(19) United States
(12) Patent Application Publication
(10) Pub. No.: US 2019/0256845 A1
(43) Pub. Date: Aug. 22, 2019

(54) COMPLEMENT COMPONENT C5 iRNA COMPOSITIONS AND METHODS OF USE THEREOF FOR TREATING PAROXYSMAL NOCTURNAL HEMOGLOBINURIA (PNH)

(71) Applicant: Alnylam Pharmaceuticals, Inc., Cambridge, MA (US)

(72) Inventors: Nader Najafian, Chestnut Hill, MA (US); Jae Kim, Lexington, MA (US); Mustafa Varoglu, Arlington, MA (US); Gabriel Robbie, Brookline, MA (US)

(21) Appl. No.: 16/307,963

(22) PCT Filed: Jun. 9, 2017
(86) PCT No.: PCT/US2017/036775

§ 371 Date: Dec. 7, 2018

Related U.S. Application Data
(60) Provisional application No. 62/429,448, filed on Dec. 2, 2016.
(60) Provisional application No. 62/348,564, filed on Jun. 10, 2016.

(51) Int. Cl. C12N 15/113; A61K 39/395; C07K 16/18; A61P 13/02

(52) U.S. Cl. CPC C12N 15/113; A61K 39/3955; C07K 16/18; A61P 13/02; A61K 2039/545; C12N 2320/31; C12N 2320/35; C12N 2310/321; C12N 2310/322; C12N 2310/315

(57) ABSTRACT

The invention relates to methods for treating subjects having a complement component C5-associated disease, e.g., paroxysmal nocturnal hemoglobinuria, using iRNA, e.g., double stranded ribonucleic acid (dsRNA), compositions targeting the complement component C5 gene, and anti-C5 antibodies, e.g., eculizumab.

### RELATED APPLICATIONS

[0001] This application claims the benefit of priority to U.S. Provisional Patent Application No. 62/348,564, filed on Jun. 10, 2016, and U.S. Provisional Patent Application No. 62/429,448, filed on Dec. 2, 2016. The entire contents of each of the foregoing patent applications are hereby incorporated herein by reference.

### SEQUENCE LISTING

[0002] The instant application contains a Sequence Listing which has been submitted electronically in ASCII format and is hereby incorporated by reference in its entirety. Said ASCII copy, created on May 31, 2017, is named 121301-06420_SL.txt and is 956,487 bytes in size.

### BACKGROUND OF THE INVENTION

[0003] Complement was first discovered in the 1890s when it was found to aid or “complement” the killing of bacteria by heat-stable antibodies present in normal serum (Walport, M. J. (2001) N Engl J Med. 344:1058). The complement system consists of more than 30 proteins that are either present as soluble proteins in the blood or are present as membrane-associated proteins. Activation of complement leads to a sequential cascade of enzymatic reactions, known as complement activation pathways, resulting in the formation of the potent anaphylatoxins C3a and C5a that elicit a plethora of physiological responses that range from chemoattraction to apoptosis. Initially, complement was thought to play a major role in innate immunity where a robust and rapid response is mounted against invading pathogens. However, recently it is becoming increasingly evident that complement also plays an important role in adaptive immunity involving T and B cells that help in elimination of pathogens (Dunkelberger J R and Song W C. (2010) Cell Res. 20:34; Molina H, et al. (1996) Proc Natl Acad Sci USA. 93:3357), in maintaining immunologic memory preventing pathogenic re-invasion, and is involved in numerous human pathological states (Qu, H, et al. (2009) Mol Immunol. 47:185; Wagner, E. and Frank M M. (2010) Nat Rev Drug Discov. 9:43).

[0004] Complement activation is known to occur through three different pathways: alternate, classical, and lectin (FIG. 1), involving proteins that mostly exist as inactive zymogens that are then sequentially cleaved and activated. All pathways of complement activation lead to cleavage of the C5 molecule generating the anaphylatoxin C5a and, C5b that subsequently forms the terminal complement complex (C5b-9). C5a exerts a predominant pro-inflammatory activity through interactions with the classical G-protein coupled receptor C5aR (CD88) as well as with the non-G protein coupled receptor C5L2 (GPR77), expressed on various immune and non-immune cells. C5b-9 causes cytolysis through the formation of the membrane attack complex (MAC), and sub-lytic MAC and soluble C5b-9 also possess a multitude of non-cytolytic immune functions. These two complement effectors, C5a and C5b-9, generated from C5 cleavage, are key components of the complement system responsible for propagating and/or initiating pathology in different diseases, including paroxysmal nocturnal hemoglobinuria, rheumatoid arthritis, ischemia-reperfusion injuries and neurodegenerative diseases.

[0005] To date, only one therapeutic that targets the C5-05a axis is available for the treatment of complement component C5-associated diseases, the anti-05 antibody, eculizumab (Soliris®). Although eculizumab has been shown to be effective for the treatment of paroxysmal nocturnal hemoglobinuria (PNH) and atypical hemolytic uremic syndrome (aHUS) and is currently being evaluated in clinical trials for additional complement component C5-associated diseases, eculizumab therapy requires weekly high dose infusions followed by biweekly maintenance infusions at a yearly cost of about $400,000. Furthermore, there is a wide-inter-individual varioation on the pharmcodynamics and clearance of eculizumab, and a significant number of patients being treated with eculizumab still require transfusions while undergoing treatment because of breakthrough or occult hemolysis (de Latour R (2015) Blood 125(5):775-83; Jodele S, et al. (2015) BBMT 21(2): S225-S226; Gatault P, et al (2015) mAbs; 7:1205-11). Accordingly, there is a need in the art for alternative therapies and combination therapies which provide substantially consistent levels of efficacy and minimal breakthrough or occult hemolysis for subjects having a complement component C5-associated disease.

### SUMMARY OF THE INVENTION

[0006] The present invention provides methods and combination therapies for treating a subject having a disorder that would benefit from inhibiting or reducing the expression of a C5 gene, e.g., a complement component C5-associated disease, such as paroxysmal nocturnal hemoglobinuria (PNH), atypical hemolytic uremic syndrome (aHUS), neuromyelitis optica (NMO), and myasthenia gravis, using iRNA compositions which effect the RNA-induced silencing complex (RISC)-mediated cleavage of RNA transcripts of a C5 gene for inhibiting the expression of a C5 gene and anti-05 antibodies, e.g., eculizumab.

[0007] The data presented herein demonstrate that iRNA agents and compositions of the invention are effective at treating PNH in eculizumab naïve subjects when administered as monotherapy at the dose of 200 mg or 400 mg. The data presented herein also demonstrate that the iRNA agents and compositions of the invention may be effectively used as a part of a combination therapy with eculizumab for treating subjects having PNH. Administering the iRNA agents and compositions of the invention in combination with eculizumab, e.g., in the setting of ongoing AD-62643 phramacology, allows reducing the dose of eculizumab while maintaining C5 knockdown, inhibition of complement activity and reduction of LDH levels in subjects with PNH. The data also demonstrate that iRNA agents and compositions of the invention are suitable for treating subjects having PNH who are inadequate responders to therapy with eculizumab alone (e.g., subjects having breakthrough hemolysis, i.e., subjects being treated with eculizumab that develop symptoms of intravascular hemolysis 1 to 2 days prior to their next eculizumab infusion).

[0008] Accordingly, in one aspect, the present prevention provides methods for treating, e.g., chronically treating, a subject having paroxysmal nocturnal hemoglobinuria (PNH). The methods include administering to an eculizumab naïve subject having PNH (i.e., a subject having PNH that has not been administered eculizumab) a 200-400 mg fixed dose of a double stranded ribonucleic acid (dsRNA) agent for inhibiting expression of complement component C5 once every week; and administering to the subject a dose of about 300 mg to about 900 mg of eculizumab, or an antigen-binding fragment thereof, wherein the dsRNA agent comprises a sense strand and an antisense strand, and wherein the sense strand comprises 5′-asasGfcAfaGfaUfAfUfuUfuuAfuAfaua-3′ (SEQ ID NO:2876) and the antisense strand comprises 5′-usAfsUfuAfuaAfaAfauaUfcUfuGfcuususudTdT-3′ (SEQ ID NO:2889), wherein a, g, c and u are 2′-O-methyl (2′-OMe) A, G, C, and U, respectively; Af, Gf, Cf and Uf are 2′-fluoro A, G, C and U, respectively; dT is a deoxy-thymine nucleotide; and s is a phosphorothioate linkage, thereby treating the subject.

[0009] In another aspect, the present invention provides methods for treating, e.g., chronically treating, a subject having paroxysmal nocturnal hemoglobinuria (PNH). The methods include administering to an eculizumab naïve subject having PNH a 200-400 mg fixed dose of a double stranded ribonucleic acid (dsRNA) agent for inhibiting expression of complement component C5 once every month; and administering to the subject a dose of about 300 mg to about 900 mg of eculizumab, or an antigen-binding fragment thereof, wherein the dsRNA agent comprises a sense strand and an antisense strand, and wherein the sense strand comprises 5′-asasGfcAfaGfaUfAfUfuUfuuAfuAfaua-3′ (SEQ ID NO:2876) and the antisense strand comprises 5′-usAfsUfuAfuaAfaAfauaUfcUfuGfcuususudTdT-3′ (SEQ ID NO:2889), wherein a, g, c and u are 2′-O-methyl (2′-OMe) A, G, C, and U, respectively; Af, Gf, Cf and Uf are 2′-fluoro A, G, C and U, respectively; dT is a deoxy-thymine nucleotide; and s is a phosphorothioate linkage, thereby treating the subject.

[0010] In one aspect, the present invention provides methods for treating, e.g., chronically treating, a subject having paroxysmal nocturnal hemoglobinuria (PNH). The methods include administering to an eculizumab naïve subject having PNH a 200 mg fixed dose of a double stranded ribonucleic acid (dsRNA) agent for inhibiting expression of complement component C5 once every week for 10-15 weeks, followed by a 400 mg fixed dose of the dsRNA agent once every week; and administering to the subject, a dose of about 300 mg to about 900 mg of eculizumab, or an antigen-binding fragment thereof, wherein the dsRNA agent comprises a sense strand and an antisense strand, and wherein the sense strand comprises 5′-asasGfcAfaGfaUfAfUfuUfuuAfuAfaua-3′ (SEQ ID NO:2876) and the antisense strand comprises 5′-usAfsUfuAfuaAfaAfauaUfcUfuGfcuususudTdT-3′ (SEQ ID NO:2889), wherein a, g, c and u are 2′-O-methyl (2′-OMe) A, G, C, and U, respectively; Af, Gf, Cf and Uf are 2′-fluoro A, G, C and U, respectively; dT is a deoxy-thymine nucleotide; and s is a phosphorothioate linkage, thereby treating the subject. In one embodiment, the dsRNA agent is administered to the subject at a 200 mg fixed dose once every week for thirteen weeks, followed by a 400 mg fixed dose of the dsRNA agent once every week.

[0011] In one aspect, the present invention provides methods for treating, e.g., chronically treating, a subject having paroxysmal nocturnal hemoglobinuria (PNH). The methods include administering to an eculizumab naïve subject having PNH a 200 mg fixed dose of a double stranded ribonucleic acid (dsRNA) agent for inhibiting expression of complement component C5 once every week for 10-15 weeks, followed by a 400 mg fixed dose of the dsRNA agent once every month; and administering to the subject, a dose of about 300 mg to about 900 mg of eculizumab, or an antigen-binding fragment thereof, wherein the dsRNA agent comprises a sense strand and an antisense strand, and wherein the sense strand comprises 5′-asasGfcAfaGfaUfAfUfuUfuuAfuAfaua-3′ (SEQ ID NO:2876) and the antisense strand comprises 5′-usAfsUfuAfuaAfaAfauaUfcUfuGfcuususudTdT-3′ (SEQ ID NO:2889), wherein a, g, c and u are 2′-O-methyl (2′-OMe) A, G, C, and U, respectively; Af, Gf, Cf and Uf are 2′-fluoro A, G, C and U, respectively; dT is a deoxy-thymine nucleotide; and s is a phosphorothioate linkage, thereby treating the subject. In one embodiment, the dsRNA agent is administered to the subject at a 200 mg fixed dose once every week for thirteen weeks, followed by a 400 mg fixed dose of the dsRNA agent once every month.

[0012] In another aspect, the present invention provides methods for treating, e.g., chronically treating, a subject having paroxysmal nocturnal hemoglobinuria (PNH). The methods include administering to an eculizumab naïve subject having PNH a 200 mg fixed dose of a double stranded ribonucleic acid (dsRNA) agent for inhibiting expression of complement component C5 once every month for 2 to 4 months; and administering to the subject, a dose of about 300 mg to about 900 mg of eculizumab, or an antigen-binding fragment thereof, wherein the dsRNA agent comprises a sense strand and an antisense strand, and wherein the sense strand comprises 5′-asasGfcAfaGfaUfAfUfuUfuuAfuAfaua-3′ (SEQ ID NO:2876) and the antisense strand comprises 5′-usAfsUfuAfuaAfaAfauaUfcUfuGfcuususudTdT-3′ (SEQ ID NO:2889), wherein a, g, c and u are 2′-O-methyl (2′-OMe) A, G, C, and U, respectively; Af, Gf, Cf and Uf are 2′-fluoro A, G, C and U, respectively; dT is a deoxy-thymine nucleotide; and s is a phosphorothioate linkage, thereby treating the subject.

[0013] In one aspect, the present invention provides methods for treating, e.g., chronically treating, a subject having paroxysmal nocturnal hemoglobinuria (PNH). The methods include administering to an eculizumab naïve subject having PNH a 200 mg fixed dose of a double stranded ribonucleic acid (dsRNA) agent for inhibiting expression of complement component C5 once every week; and administering to the subject, a dose of about 300 mg to about 900 mg of eculizumab, or an antigen-binding fragment thereof, once every four weeks, wherein the dsRNA agent comprises a sense strand and an antisense strand, and wherein the sense strand comprises 5′-asasGfcAfaGfaUfAfUfuUfuuAfuAfaua-3′ (SEQ ID NO:2876) and the antisense strand comprises 5′-usAfsUfuAfuaAfaAfauaUfcUfuGfcuususudTdT-3′ (SEQ ID NO:2889), wherein a, g, c and u are 2′-O-methyl (2′-OMe) A, G, C, and U, respectively; Af, Gf, Cf and Uf are 2′-fluoro A, G, C and U, respectively; dT is a deoxy-thymine nucleotide; and s is a phosphorothioate linkage, thereby treating the subject. In one embodiment, the dsRNA agent is administered to the subject at a 200 mg fixed dose of the dsRNA agent once every week for eight weeks, e.g., prior to the administration of eculizumab. In one embodiment, the dsRNA agent is administered to the subject at a 200 mg fixed dose of the dsRNA agent once every week for eight weeks, e.g., prior to the administration of eculizumab, and once every month thereafter. In another embodiment, the dsRNA agent is administered to the subject at a 200 mg fixed dose of the dsRNA agent once every week for eight weeks, e.g., prior to the administration of eculizumab, and once every three months thereafter. In another embodiment, the dsRNA agent is administered to the subject at a 200 mg fixed dose of the dsRNA agent once every week for eight weeks, e.g., prior to the administration of eculizumab, and once every six months thereafter. In one embodiment, the dsRNA agent is chronically administered to the subject at a 200 mg fixed dose of the dsRNA agent once every week.

[0014] In one aspect, the present invention provides methods for treating, e.g., chronically treating, a subject having paroxysmal nocturnal hemoglobinuria (PNH). The methods include administering to an eculizumab naïve subject having PNH a 200 mg fixed dose of a double stranded ribonucleic acid (dsRNA) agent for inhibiting expression of complement component C5 once every week; and administering to the subject, a dose of about 300 mg of eculizumab, or an antigen-binding fragment thereof, once every four weeks, wherein the dsRNA agent comprises a sense strand and an antisense strand, and wherein the sense strand comprises 5′-asasGfcAfaGfaUfAfUfuUfuuAfuAfaua-3′ (SEQ ID NO:2876) and the antisense strand comprises 5′-usAfsUfuAfuaAfaAfauaUfcUfuGfcuususudTdT-3′ (SEQ ID NO:2889), wherein a, g, c and u are 2′-O-methyl (2′-OMe) A, G, C, and U, respectively; Af, Gf, Cf and Uf are 2′-fluoro A, G, C and U, respectively; dT is a deoxy-thymine nucleotide; and s is a phosphorothioate linkage, thereby treating the subject. In one embodiment, the dsRNA agent is administered to the subject at a 200 mg fixed dose of the dsRNA agent once every week for eight weeks, e.g., prior to the administration of eculizumab. In one embodiment, the dsRNA agent is administered to the subject at a 200 mg fixed dose of the dsRNA agent once every week for eight weeks, e.g., prior to the administration of eculizumab, and once every month thereafter. In another embodiment, the dsRNA agent is administered to the subject at a 200 mg fixed dose of the dsRNA agent once every week for eight weeks, e.g., prior to the administration of eculizumab, and once every three months thereafter. In another embodiment, the dsRNA agent is administered to the subject at a 200 mg fixed dose of the dsRNA agent once every week for eight weeks, e.g., prior to the administration of eculizumab, and once every six months thereafter. In one embodiment, the dsRNA agent is chronically administered to the subject at a 200 mg fixed dose of the dsRNA agent once every week.

[0015] In one aspect, the present invention provides methods for treating, e.g., chronically treating, a subject having paroxysmal nocturnal hemoglobinuria (PNH). The methods include administering to an eculizumab naïve subject having PNH a 200 mg fixed dose of a double stranded ribonucleic acid (dsRNA) agent for inhibiting expression of complement component C5 once every week; and administering to the subject, a dose of about 600 mg of eculizumab, or an antigen-binding fragment thereof, once every four weeks, wherein the dsRNA agent comprises a sense strand and an antisense strand, and wherein the sense strand comprises 5′-asasGfcAfaGfaUfAfUfuUfuuAfuAfaua-3′ (SEQ ID NO:2876) and the antisense strand comprises 5′-usAfsUfuAfuaAfaAfauaUfcUfuGfcuususudTdT-3′ (SEQ ID NO:2889), wherein a, g, c and u are 2′-O-methyl (2′-OMe) A, G, C, and U, respectively; Af, Gf, Cf and Uf are 2′-fluoro A, G, C and U, respectively; dT is a deoxy-thymine nucleotide; and s is a phosphorothioate linkage, thereby treating the subject. In one embodiment, the dsRNA agent is administered to the subject at a 200 mg fixed dose of the dsRNA agent once every week for eight weeks, e.g., prior to the administration of eculizumab. In one embodiment, the dsRNA agent is administered to the subject at a 200 mg fixed dose of the dsRNA agent once every week for eight weeks, e.g., prior to the administration of eculizumab, and once every month thereafter. In another embodiment, the dsRNA agent is administered to the subject at a 200 mg fixed dose of the dsRNA agent once every week for eight weeks, e.g., prior to the administration of eculizumab, and once every three months thereafter. In another embodiment, the dsRNA agent is administered to the subject at a 200 mg fixed dose of the dsRNA agent once every week for eight weeks, e.g., prior to the administration of eculizumab, and once every six months thereafter. In one embodiment, the dsRNA agent is chronically administered to the subject at a 200 mg fixed dose of the dsRNA agent once every week.

[0016] In one aspect, the present invention provides methods for treating, e.g., chronically treating, a subject having paroxysmal nocturnal hemoglobinuria (PNH). The methods include administering to an eculizumab naïve subject having PNH a 200 mg fixed dose of a double stranded ribonucleic acid (dsRNA) agent for inhibiting expression of complement component C5 once every week; and administering to the subject, a dose of about 900 mg of eculizumab, or an antigen-binding fragment thereof, once every four weeks, wherein the dsRNA agent comprises a sense strand and an antisense strand, and wherein the sense strand comprises 5′-asasGfcAfaGfaUfAfUfuUfuuAfuAfaua-3′ (SEQ ID NO:2876) and the antisense strand comprises 5′-usAfsUfuAfuaAfaAfauaUfcUfuGfcuususudTdT-3′ (SEQ ID NO:2889), wherein a, g, c and u are 2′-O-methyl (2′-OMe) A, G, C, and U, respectively; Af, Gf, Cf and Uf are 2′-fluoro A, G, C and U, respectively; dT is a deoxy-thymine nucleotide; and s is a phosphorothioate linkage, thereby treating the subject. In one embodiment, the dsRNA agent is administered to the subject at a 200 mg fixed dose of the dsRNA agent once every week for eight weeks, e.g., prior to the administration of eculizumab. In one embodiment, the dsRNA agent is administered to the subject at a 200 mg fixed dose of the dsRNA agent once every week for eight weeks, e.g., prior to the administration of eculizumab, and once every month thereafter. In another embodiment, the dsRNA agent is administered to the subject at a 200 mg fixed dose of the dsRNA agent once every week for eight weeks, e.g., prior to the administration of eculizumab, and once every three months thereafter. In another embodiment, the dsRNA agent is administered to the subject at a 200 mg fixed dose of the dsRNA agent once every week for eight weeks, e.g., prior to the administration of eculizumab, and once every six months thereafter. In one embodiment, the dsRNA agent is chronically administered to the subject at a 200 mg fixed dose of the dsRNA agent once every week.

[0017] In another aspect, the present invention provides methods for treating, e.g., chronically treating, a subject having paroxysmal nocturnal hemoglobinuria (PNH). The methods include administering to an eculizumab naïve subject having PNH a 200 mg fixed dose of a double stranded ribonucleic acid (dsRNA) agent for inhibiting expression of complement component C5 once every month; and administering to the subject, a dose of about 300 mg to about 900 mg of eculizumab, or an antigen-binding fragment thereof, once every four weeks, wherein the dsRNA agent comprises a sense strand and an antisense strand, and wherein the sense strand comprises 5′-asasGfcAfaGfaUfAfUfuUfuuAfuAfaua-3′ (SEQ ID NO:2876) and the antisense strand comprises 5′-usAfsUfuAfuaAfaAfauaUfcUfuGfcuususudTdT-3′ (SEQ ID NO:2889), wherein a, g, c and u are 2′-O-methyl (2′-OMe) A, G, C, and U, respectively; Af, Gf, Cf and Uf are 2′-fluoro A, G, C and U, respectively; dT is a deoxy-thymine nucleotide; and s is a phosphorothioate linkage, thereby treating the subject. In one embodiment, the dsRNA agent is administered to the subject at a 200 mg fixed dose of the dsRNA agent once every month for two months, e.g., prior to the administration of eculizumab. In one embodiment, the dsRNA agent is administered to the subject at a 200 mg fixed dose of the dsRNA agent once every month for two months, e.g., prior to the administration of eculizumab, and once every three months thereafter. In one embodiment, the dsRNA agent is administered to the subject at a 200 mg fixed dose of the dsRNA agent once every month for two months, e.g., prior to the administration of eculizumab, and once every six months thereafter. In one embodiment, the dsRNA agent is chronically administered to the subject at a 200 mg fixed dose of the dsRNA agent once every month.

[0018] In another aspect, the present invention provides methods for treating, e.g., chronically treating, a subject having paroxysmal nocturnal hemoglobinuria (PNH). The methods include administering to an eculizumab naïve subject having PNH a 200 mg fixed dose of a double stranded ribonucleic acid (dsRNA) agent for inhibiting expression of complement component C5 once every month; and administering to the subject, a dose of about 300 mg of eculizumab, or an antigen-binding fragment thereof, once every four weeks, wherein the dsRNA agent comprises a sense strand and an antisense strand, and wherein the sense strand comprises 5′-asasGfcAfaGfaUfAfUfuUfuuAfuAfaua-3′ (SEQ ID NO:2876) and the antisense strand comprises 5′-usAfsUfuAfuaAfaAfauaUfcUfuGfcuususudTdT-3′ (SEQ ID NO:2889),

wherein a, g, c and u are 2′-O-methyl (2′-OMe) A, G, C, and U, respectively; Af, Gf, Cf and Uf are 2′-fluoro A, G, C and U, respectively; dT is a deoxy-thymine nucleotide; and s is a phosphorothioate linkage, thereby treating the subject. In one embodiment, the dsRNA agent is administered to the subject at a 200 mg fixed dose of the dsRNA agent once every month for two months, e.g., prior to the administration of eculizumab. In one embodiment, the dsRNA agent is administered to the subject at a 200 mg fixed dose of the dsRNA agent once every month for two months, e.g., prior to the administration of eculizumab, and once every three months thereafter. In one embodiment, the dsRNA agent is administered to the subject at a 200 mg fixed dose of the dsRNA agent once every month for two months, e.g., prior to the administration of eculizumab, and once every six months thereafter. In one embodiment, the dsRNA agent is chronically administered to the subject at a 200 mg fixed dose of the dsRNA agent once every month.

[0019] In another aspect, the present invention provides methods for treating, e.g., chronically treating, a subject having paroxysmal nocturnal hemoglobinuria (PNH). The methods include administering to an eculizumab naïve subject having PNH a 200 mg fixed dose of a double stranded ribonucleic acid (dsRNA) agent for inhibiting expression of complement component C5 once every month; and administering to the subject, a dose of about 600 mg of eculizumab, or an antigen-binding fragment thereof, once every four weeks, wherein the dsRNA agent comprises a sense strand and an antisense strand, and wherein the sense strand comprises 5′-asasGfcAfaGfaUfAfUfuUfuuAfuAfaua-3′ (SEQ ID NO:2876) and the antisense strand comprises 5′-usAfsUfuAfuaAfaAfauaUfcUfuGfcuususudTdT-3′ (SEQ ID NO:2889),

wherein a, g, c and u are 2′-O-methyl (2′-OMe) A, G, C, and U, respectively; Af, Gf, Cf and Uf are 2′-fluoro A, G, C and U, respectively; dT is a deoxy-thymine nucleotide; and s is a phosphorothioate linkage, thereby treating the subject. In one embodiment, the dsRNA agent is administered to the subject at a 200 mg fixed dose of the dsRNA agent once every month for two months, e.g., prior to the administration of eculizumab. In one embodiment, the dsRNA agent is administered to the subject at a 200 mg fixed dose of the dsRNA agent once every month for two months, e.g., prior to the administration of eculizumab, and once every three months thereafter. In one embodiment, the dsRNA agent is administered to the subject at a 200 mg fixed dose of the dsRNA agent once every month for two months, e.g., prior to the administration of eculizumab, and once every six months thereafter. In one embodiment, the dsRNA agent is chronically administered to the subject at a 200 mg fixed dose of the dsRNA agent once every month.

[0020] In another aspect, the present invention provides methods for treating, e.g., chronically treating, a subject having paroxysmal nocturnal hemoglobinuria (PNH). The methods include administering to an eculizumab naïve subject having PNH a 200 mg fixed dose of a double stranded ribonucleic acid (dsRNA) agent for inhibiting expression of complement component C5 once every month; and administering to the subject, a dose of about 900 mg of eculizumab, or an antigen-binding fragment thereof, once every four weeks, wherein the dsRNA agent comprises a sense strand and an antisense strand, and wherein the sense strand comprises 5′-asasGfcAfaGfaUfAfUfuUfuuAfuAfaua-3′ (SEQ ID NO:2876) and the antisense strand comprises 5′-usAfsUfuAfuaAfaAfauaUfcUfuGfcuususudTdT-3′ (SEQ ID NO:2889),

wherein a, g, c and u are 2′-O-methyl (2′-OMe) A, G, C, and U, respectively; Af, Gf, Cf and Uf are 2′-fluoro A, G, C and U, respectively; dT is a deoxy-thymine nucleotide; and s is a phosphorothioate linkage, thereby treating the subject. In one embodiment, the dsRNA agent is administered to the subject at a 200 mg fixed dose of the dsRNA agent once every month for two months, e.g., prior to the administration of eculizumab. In one embodiment, the dsRNA agent is administered to the subject at a 200 mg fixed dose of the dsRNA agent once every month for two months, e.g., prior to the administration of eculizumab, and once every three months thereafter. In one embodiment, the dsRNA agent is administered to the subject at a 200 mg fixed dose of the dsRNA agent once every month for two months, e.g., prior to the administration of eculizumab, and once every six months thereafter. In one embodiment, the dsRNA agent is chronically administered to the subject at a 200 mg fixed dose of the dsRNA agent once every month. In one aspect, the present invention provides methods for treating, e.g., chronically treating, a subject having paroxysmal nocturnal hemoglobinuria (PNH). The methods include administering to an eculizumab naïve subject having PNH a 400 mg fixed dose of a double stranded ribonucleic acid (dsRNA) agent for inhibiting expression of complement component C5 once every week; and administering to the subject, a dose of about 300 mg to about 900 mg of eculizumab, or an antigen-binding fragment thereof, once every four weeks, wherein the dsRNA agent comprises a sense strand and an antisense strand, and wherein the sense strand comprises 5′-asasGfcAfaGfaUfAfUfuUfuuAfuAfaua-3′ (SEQ ID NO:2876) and the antisense strand comprises 5′-usAfsUfuAfuaAfaAfauaUfcUfuGfcuususudTdT-3′ (SEQ ID NO:2889), wherein a, g, c and u are 2′-O-methyl (2′-OMe) A, G, C, and U, respectively; Af, Gf, Cf and Uf are 2′-fluoro A, G, C and U, respectively; dT is a deoxy-thymine nucleotide; and s is a phosphorothioate linkage, thereby treating the subject. In one embodiment, the dsRNA agent is administered to the subject at a 400 mg fixed dose of the dsRNA agent once every week for eight weeks, e.g., prior to the administration of eculizumab. In one embodiment, the dsRNA agent is administered to the subject at a 400 mg fixed dose of the dsRNA agent once every week for eight weeks, e.g., prior to the administration of eculizumab, and once every month thereafter. In one embodiment, the dsRNA agent is administered to the subject at a 400 mg fixed dose of the dsRNA agent once every weeks for eight weeks, e.g., prior to the administration of eculizumab, and once every three months thereafter. In one embodiment, the dsRNA agent is administered to the subject at a 400 mg fixed dose of the dsRNA agent once every weeks for eight weeks, e.g., prior to the administration of eculizumab, and once every six months thereafter. In one embodiment, the dsRNA agent is chronically administered to the subject at a 400 mg fixed dose of the dsRNA agent once every week.

[0021] In one aspect, the present invention provides methods for treating, e.g., chronically treating, a subject having paroxysmal nocturnal hemoglobinuria (PNH). The methods include administering to an eculizumab naïve subject having PNH a 400 mg fixed dose of a double stranded ribonucleic acid (dsRNA) agent for inhibiting expression of complement component C5 once every week; and administering to the subject, a dose of about 300 mg of eculizumab, or an antigen-binding fragment thereof, once every four weeks, wherein the dsRNA agent comprises a sense strand and an antisense strand, and wherein the sense strand comprises 5′-asasGfcAfaGfaUfAfUfuUfuuAfuAfaua-3′ (SEQ ID NO:2876) and the antisense strand comprises 5′-usAfsUfuAfuaAfaAfauaUfcUfuGfcuususudTdT-3′ (SEQ ID NO:2889), wherein a, g, c and u are 2′-O-methyl (2′-OMe) A, G, C, and U, respectively; Af, Gf, Cf and Uf are 2′-fluoro A, G, C and U, respectively; dT is a deoxy-thymine nucleotide; and s is a phosphorothioate linkage, thereby treating the subject. In one embodiment, the dsRNA agent is administered to the subject at a 400 mg fixed dose of the dsRNA agent once every week for eight weeks, e.g., prior to the administration of eculizumab. In one embodiment, the dsRNA agent is administered to the subject at a 400 mg fixed dose of the dsRNA agent once every week for eight weeks, e.g., prior to the administration of eculizumab, and once every month thereafter. In one embodiment, the dsRNA agent is administered to the subject at a 400 mg fixed dose of the dsRNA agent once every weeks for eight weeks, e.g., prior to the administration of eculizumab, and once every three months thereafter. In one embodiment, the dsRNA agent is administered to the subject at a 400 mg fixed dose of the dsRNA agent once every weeks for eight weeks, e.g., prior to the administration of eculizumab, and once every six months thereafter. In one embodiment, the dsRNA agent is chronically administered to the subject at a 400 mg fixed dose of the dsRNA agent once every week.

[0022] In one aspect, the present invention provides methods for treating, e.g., chronically treating, a subject having paroxysmal nocturnal hemoglobinuria (PNH). The methods include administering to an eculizumab naïve subject having PNH a 400 mg fixed dose of a double stranded ribonucleic acid (dsRNA) agent for inhibiting expression of complement component C5 once every week; and administering to the subject, a dose of about 600 mg of eculizumab, or an antigen-binding fragment thereof, once every four weeks, wherein the dsRNA agent comprises a sense strand and an antisense strand, and wherein the sense strand comprises 5′-asasGfcAfaGfaUfAfUfuUfuuAfuAfaua-3′ (SEQ ID NO:2876) and the antisense strand comprises 5′-usAfsUfuAfuaAfaAfauaUfcUfuGfcuususudTdT-3′ (SEQ ID NO:2889), wherein a, g, c and u are 2′-O-methyl (2′-OMe) A, G, C, and U, respectively; Af, Gf, Cf and Uf are 2′-fluoro A, G, C and U, respectively; dT is a deoxy-thymine nucleotide; and s is a phosphorothioate linkage, thereby treating the subject. In one embodiment, the dsRNA agent is administered to the subject at a 400 mg fixed dose of the dsRNA agent once every week for eight weeks, e.g., prior to the administration of eculizumab. In one embodiment, the dsRNA agent is administered to the subject at a 400 mg fixed dose of the dsRNA agent once every week for eight weeks, e.g., prior to the administration of eculizumab, and once every month thereafter. In one embodiment, the dsRNA agent is administered to the subject at a 400 mg fixed dose of the dsRNA agent once every weeks for eight weeks, e.g., prior to the administration of eculizumab, and once every three months thereafter. In one embodiment, the dsRNA agent is administered to the subject at a 400 mg fixed dose of the dsRNA agent once every weeks for eight weeks, e.g., prior to the administration of eculizumab, and once every six months thereafter. In one embodiment, the dsRNA agent is chronically administered to the subject at a 400 mg fixed dose of the dsRNA agent once every week.

[0023] In one aspect, the present invention provides methods for treating, e.g., chronically treating, a subject having paroxysmal nocturnal hemoglobinuria (PNH). The methods include administering to an eculizumab naïve subject having PNH a 400 mg fixed dose of a double stranded ribonucleic acid (dsRNA) agent for inhibiting expression of complement component C5 once every week; and administering to the subject, a dose of about 900 mg of eculizumab, or an antigen-binding fragment thereof, once every four weeks, wherein the dsRNA agent comprises a sense strand and an antisense strand, and wherein the sense strand comprises 5′-asasGfcAfaGfaUfAfUfuUfuuAfuAfaua-3′ (SEQ ID NO:2876) and the antisense strand comprises 5′-usAfsUfuAfuaAfaAfauaUfcUfuGfcuususudTdT-3′ (SEQ ID NO:2889), wherein a, g, c and u are 2′-O-methyl (2′-OMe) A, G, C, and U, respectively; Af, Gf, Cf and Uf are 2′-fluoro A, G, C and U, respectively; dT is a deoxy-thymine nucleotide; and s is a phosphorothioate linkage, thereby treating the subject. In one embodiment, the dsRNA agent is administered to the subject at a 400 mg fixed dose of the dsRNA agent once every week for eight weeks, e.g., prior to the administration of eculizumab. In one embodiment, the dsRNA agent is administered to the subject at a 400 mg fixed dose of the dsRNA agent once every week for eight weeks, e.g., prior to the administration of eculizumab, and once every month thereafter. In one embodiment, the dsRNA agent is administered to the subject at a 400 mg fixed dose of the dsRNA agent once every weeks for eight weeks, e.g., prior to the administration of eculizumab, and once every three months thereafter. In one embodiment, the dsRNA agent is administered to the subject at a 400 mg fixed dose of the dsRNA agent once every weeks for eight weeks, e.g., prior to the administration of eculizumab, and once every six months thereafter. In one embodiment, the dsRNA agent is chronically administered to the subject at a 400 mg fixed dose of the dsRNA agent once every week.

[0024] In another aspect, the present invention provides methods for treating, e.g., chronically treating, a subject having paroxysmal nocturnal hemoglobinuria (PNH). The methods include administering to an eculizumab naïve subject having PNH a 400 mg fixed dose of a double stranded ribonucleic acid (dsRNA) agent for inhibiting expression of complement component C5 once every month; and administering to the subject, a dose of about 300 mg to about 900 mg of eculizumab, or an antigen-binding fragment thereof, once every four weeks, wherein the dsRNA agent comprises a sense strand and an antisense strand, and wherein the sense strand comprises 5′-asasGfcAfaGfaUfAfUfuUfuuAfuAfaua-3′ (SEQ ID NO:2876) and the antisense strand comprises 5′-usAfsUfuAfuaAfaAfauaUfcUfuGfcuususudTdT-3′ (SEQ ID NO:2889), wherein a, g, c and u are 2′-O-methyl (2′-OMe) A, G, C, and U, respectively; Af, Gf, Cf and Uf are 2′-fluoro A, G, C and U, respectively; dT is a deoxy-thymine nucleotide; and s is a phosphorothioate linkage, thereby treating the subject. In one embodiment, the dsRNA agent is administered to the subject at a 400 mg fixed dose of the dsRNA agent once every month for two months, e.g., prior to the administration of eculizumab. In one embodiment, the dsRNA agent is administered to the subject at a 400 mg fixed dose of the dsRNA agent once every month for two months, e.g., prior to the administration of eculizumab, and once every three months thereafter. In one embodiment, the dsRNA agent is administered to the subject at a 400 mg fixed dose of the dsRNA agent once every month for two months, e.g., prior to the administration of eculizumab, and once every six months thereafter. In one embodiment, the dsRNA agent is chronically administered to the subject at a 400 mg fixed dose of the dsRNA agent once every month.

[0025] In another aspect, the present invention provides methods for treating, e.g., chronically treating, a subject having paroxysmal nocturnal hemoglobinuria (PNH). The methods include administering to an eculizumab naïve subject having PNH a 400 mg fixed dose of a double stranded ribonucleic acid (dsRNA) agent for inhibiting expression of complement component C5 once every month; and administering to the subject, a dose of about 300 mg of eculizumab, or an antigen-binding fragment thereof, wherein the dsRNA agent comprises a sense strand and an antisense strand, and wherein the sense strand comprises 5′-asasGfcAfaGfaUfAfUfuUfuuAfuAfaua-3′ (SEQ ID NO:2876) and the antisense strand comprises 5′-usAfsUfuAfuaAfaAfauaUfcUfuGfcuususudTdT-3′ (SEQ ID NO:2889),

wherein a, g, c and u are 2′-O-methyl (2′-OMe) A, G, C, and U, respectively; Af, Gf, Cf and Uf are 2′-fluoro A, G, C and U, respectively; dT is a deoxy-thymine nucleotide; and s is a phosphorothioate linkage, thereby treating the subject. In one embodiment, the dsRNA agent is administered to the subject at a 400 mg fixed dose of the dsRNA agent once every month for two months, e.g., prior to the administration of eculizumab. In one embodiment, the dsRNA agent is administered to the subject at a 400 mg fixed dose of the dsRNA agent once every month for two months, e.g., prior to the administration of eculizumab, and once every three months thereafter. In one embodiment, the dsRNA agent is administered to the subject at a 400 mg fixed dose of the dsRNA agent once every month for two months, e.g., prior to the administration of eculizumab, and once every six months thereafter. In one embodiment, the dsRNA agent is chronically administered to the subject at a 400 mg fixed dose of the dsRNA agent once every month.

[0026] In another aspect, the present invention provides methods for treating, e.g., chronically treating, a subject having paroxysmal nocturnal hemoglobinuria (PNH). The methods include administering to an eculizumab naïve subject having PNH a 400 mg fixed dose of a double stranded ribonucleic acid (dsRNA) agent for inhibiting expression of complement component C5 once every month; and administering to the subject, a dose of about 600 mg of eculizumab, or an antigen-binding fragment thereof, wherein the dsRNA agent comprises a sense strand and an antisense strand, and wherein the sense strand comprises 5′-asasGfcAfaGfaUfAfUfuUfuuAfuAfaua-3′ (SEQ ID NO:2876) and the antisense strand comprises 5′-usAfsUfuAfuaAfaAfauaUfcUfuGfcuususudTdT-3′ (SEQ ID NO:2889),

wherein a, g, c and u are 2′-O-methyl (2′-OMe) A, G, C, and U, respectively; Af, Gf, Cf and Uf are 2′-fluoro A, G, C and U, respectively; dT is a deoxy-thymine nucleotide; and s is a phosphorothioate linkage, thereby treating the subject. In one embodiment, the dsRNA agent is administered to the subject at a 400 mg fixed dose of the dsRNA agent once every month for two months, e.g., prior to the administration of eculizumab. In one embodiment, the dsRNA agent is administered to the subject at a 400 mg fixed dose of the dsRNA agent once every month for two months, e.g., prior to the administration of eculizumab, and once every three months thereafter. In one embodiment, the dsRNA agent is administered to the subject at a 400 mg fixed dose of the dsRNA agent once every month for two months, e.g., prior to the administration of eculizumab, and once every six months thereafter. In one embodiment, the dsRNA agent is chronically administered to the subject at a 400 mg fixed dose of the dsRNA agent once every month.

[0027] In another aspect, the present invention provides methods for treating, e.g., chronically treating, a subject having paroxysmal nocturnal hemoglobinuria (PNH). The methods include administering to an eculizumab naïve subject having PNH a 400 mg fixed dose of a double stranded ribonucleic acid (dsRNA) agent for inhibiting expression of complement component C5 once every month; and administering to the subject, a dose of about 900 mg of eculizumab, or an antigen-binding fragment thereof, wherein the dsRNA agent comprises a sense strand and an antisense strand, and wherein the sense strand comprises 5′-asasGfcAfaGfaUfAfUfuUfuuAfuAfaua-3′ (SEQ ID NO:2876) and the antisense strand comprises 5′-usAfsUfuAfuaAfaAfauaUfcUfuGfcuususudTdT-3′ (SEQ ID NO:2889),

wherein a, g, c and u are 2′-O-methyl (2′-OMe) A, G, C, and U, respectively; Af, Gf, Cf and Uf are 2′-fluoro A, G, C and U, respectively; dT is a deoxy-thymine nucleotide; and s is a phosphorothioate linkage, thereby treating the subject. In one embodiment, the dsRNA agent is administered to the subject at a 400 mg fixed dose of the dsRNA agent once every month for two months, e.g., prior to the administration of eculizumab. In one embodiment, the dsRNA agent is administered to the subject at a 400 mg fixed dose of the dsRNA agent once every month for two months, e.g., prior to the administration of eculizumab, and once every three months thereafter. In one embodiment, the dsRNA agent is administered to the subject at a 400 mg fixed dose of the dsRNA agent once every month for two months, e.g., prior to the administration of eculizumab, and once every six months thereafter. In one embodiment, the dsRNA agent is chronically administered to the subject at a 400 mg fixed dose of the dsRNA agent once every month. In one aspect, the present invention provides methods for treating, e.g., chronically treating, a subject having paroxysmal nocturnal hemoglobinuria (PNH). The methods include administering to a subject having PNH and previously treated with eculizumab, a 400 mg fixed dose of a double stranded ribonucleic acid (dsRNA) agent for inhibiting expression of complement component C5 once every week; and administering to the subject, a dose of about 300 mg to about 900 mg of eculizumab, or an antigen-binding fragment thereof, once every four weeks, wherein the dsRNA agent comprises a sense strand and an antisense strand, and wherein the sense strand comprises 5′-asasGfcAfaGfaUfAfUfuUfuuAfuAfaua-3′ (SEQ ID NO:2876) and the antisense strand comprises 5′-usAfsUfuAfuaAfaAfauaUfcUfuGfcuususudTdT-3′ (SEQ ID NO:2889), wherein a, g, c and u are 2′-O-methyl (2′-OMe) A, G, C, and U, respectively; Af, Gf, Cf and Uf are 2′-fluoro A, G, C and U, respectively; dT is a deoxy-thymine nucleotide; and s is a phosphorothioate linkage, thereby treating the subject. In one embodiment, the dsRNA agent is administered to the subject at a 400 mg fixed dose of the dsRNA agent once every week for eight weeks, e.g., prior to administration of the dose of about 300 mg to about 900 mg of eculizumab, or an antigen-binding fragment thereof. In one embodiment, the dsRNA agent is administered to the subject at a 400 mg fixed dose of the dsRNA agent once every week for eight weeks, e.g., prior to administration of the dose of about 300 mg to about 900 mg of eculizumab, or an antigen-binding fragment thereof, and once every month thereafter. In one embodiment, the dsRNA agent is administered to the subject at a 400 mg fixed dose of the dsRNA agent once every weeks for eight weeks, e.g., prior to administration of the dose of about 300 mg to about 900 mg of eculizumab, or an antigen-binding fragment thereof, and once every three months thereafter. In one embodiment, the dsRNA agent is administered to the subject at a 400 mg fixed dose of the dsRNA agent once every weeks for eight weeks, e.g., prior to administration of the dose of about 300 mg to about 900 mg of eculizumab, or an antigen-binding fragment thereof, and once every six months thereafter. In one embodiment, the dsRNA agent is chronically administered to the subject at a 400 mg fixed dose of the dsRNA agent once every week.

[0028] In one aspect, the present invention provides methods for treating, e.g., chronically treating, a subject having paroxysmal nocturnal hemoglobinuria (PNH). The methods include administering to a subject having PNH and previously treated with eculizumab a 400 mg fixed dose of a double stranded ribonucleic acid (dsRNA) agent for inhibiting expression of complement component C5 once every week; and administering to the subject, a dose of about 300 mg of eculizumab, or an antigen-binding fragment thereof, once every four weeks, wherein the dsRNA agent comprises a sense strand and an antisense strand, and wherein the sense strand comprises 5′-asasGfcAfaGfaUfAfUfuUfuuAfuAfaua-3′ (SEQ ID NO:2876) and the antisense strand comprises 5′-usAfsUfuAfuaAfaAfauaUfcUfuGfcuususudTdT-3′ (SEQ ID NO:2889), wherein a, g, c and u are 2′-O-methyl (2′-OMe) A, G, C, and U, respectively; Af, Gf, Cf and Uf are 2′-fluoro A, G, C and U, respectively; dT is a deoxy-thymine nucleotide; and s is a phosphorothioate linkage, thereby treating the subject. In one embodiment, the dsRNA agent is administered to the subject at a 400 mg fixed dose of the dsRNA agent once every week for eight weeks, e.g., prior to administration of the dose of about 300 mg of eculizumab, or an antigen-binding fragment thereof. In one embodiment, the dsRNA agent is administered to the subject at a 400 mg fixed dose of the dsRNA agent once every week for eight weeks, e.g., prior to administration of the dose of about 300 mg of eculizumab, or an antigen-binding fragment thereof, and once every month thereafter. In one embodiment, the dsRNA agent is administered to the subject at a 400 mg fixed dose of the dsRNA agent once every weeks for eight weeks, e.g., prior to administration of the dose of about 300 mg of eculizumab, or an antigen-binding fragment thereof, and once every three months thereafter. In one embodiment, the dsRNA agent is administered to the subject at a 400 mg fixed dose of the dsRNA agent once every weeks for eight weeks, e.g., prior to administration of the dose of about 300 mg of eculizumab, or an antigen-binding fragment thereof, and once every six months thereafter. In one embodiment, the dsRNA agent is chronically administered to the subject at a 400 mg fixed dose of the dsRNA agent once every week.

[0029] In one aspect, the present invention provides methods for treating, e.g., chronically treating, a subject having paroxysmal nocturnal hemoglobinuria (PNH). The methods include administering to a subject having PNH and previously treated with eculizumab a 400 mg fixed dose of a double stranded ribonucleic acid (dsRNA) agent for inhibiting expression of complement component C5 once every week; and administering to the subject, a dose of about 600 mg of eculizumab, or an antigen-binding fragment thereof, once every four weeks, wherein the dsRNA agent comprises a sense strand and an antisense strand, and wherein the sense strand comprises 5′-asasGfcAfaGfaUfAfUfuUfuuAfuAfaua-3′ (SEQ ID NO:2876) and the antisense strand comprises 5′-usAfsUfuAfuaAfaAfauaUfcUfuGfcuususudTdT-3′ (SEQ ID NO:2889), wherein a, g, c and u are 2′-O-methyl (2′-OMe) A, G, C, and U, respectively; Af, Gf, Cf and Uf are 2′-fluoro A, G, C and U, respectively; dT is a deoxy-thymine nucleotide; and s is a phosphorothioate linkage, thereby treating the subject. In one embodiment, the dsRNA agent is administered to the subject at a 400 mg fixed dose of the dsRNA agent once every week for eight weeks, e.g., prior to administration of the dose of about 600 mg of eculizumab, or an antigen-binding fragment thereof. In one embodiment, the dsRNA agent is administered to the subject at a 400 mg fixed dose of the dsRNA agent once every week for eight weeks, e.g., prior to administration of the dose of about 600 mg of eculizumab, or an antigen-binding fragment thereof, and once every month thereafter. In one embodiment, the dsRNA agent is administered to the subject at a 400 mg fixed dose of the dsRNA agent once every weeks for eight weeks, e.g., prior to administration of the dose of about 600 mg of eculizumab, or an antigen-binding fragment thereof, and once every three months thereafter. In one embodiment, the dsRNA agent is administered to the subject at a 400 mg fixed dose of the dsRNA agent once every weeks for eight weeks, e.g., prior to administration of the dose of about 600 mg of eculizumab, or an antigen-binding fragment thereof, and once every six months thereafter. In one embodiment, the dsRNA agent is chronically administered to the subject at a 400 mg fixed dose of the dsRNA agent once every week.

[0030] In one aspect, the present invention provides methods for treating, e.g., chronically treating, a subject having paroxysmal nocturnal hemoglobinuria (PNH). The methods include administering to a subject having PNH and previously treated with eculizumab a 400 mg fixed dose of a double stranded ribonucleic acid (dsRNA) agent for inhibiting expression of complement component C5 once every week; and administering to the subject, a dose of about 900 mg of eculizumab, or an antigen-binding fragment thereof, once every four weeks, wherein the dsRNA agent comprises a sense strand and an antisense strand, and wherein the sense strand comprises 5′-asasGfcAfaGfaUfAfUfuUfuuAfuAfaua-3′ (SEQ ID NO:2876) and the antisense strand comprises 5′-usAfsUfuAfuaAfaAfauaUfcUfuGfcuususudTdT-3′ (SEQ ID NO:2889), wherein a, g, c and u are 2′-O-methyl (2′-OMe) A, G, C, and U, respectively; Af, Gf, Cf and Uf are 2′-fluoro A, G, C and U, respectively; dT is a deoxy-thymine nucleotide; and s is a phosphorothioate linkage, thereby treating the subject. In one embodiment, the dsRNA agent is administered to the subject at a 400 mg fixed dose of the dsRNA agent once every week for eight weeks, e.g., prior to administration of the dose of about 900 mg of eculizumab, or an antigen-binding fragment thereof. In one embodiment, the dsRNA agent is administered to the subject at a 400 mg fixed dose of the dsRNA agent once every week for eight weeks, e.g., prior to administration of the dose of about 900 mg of eculizumab, or an antigen-binding fragment thereof, and once every month thereafter. In one embodiment, the dsRNA agent is administered to the subject at a 400 mg fixed dose of the dsRNA agent once every weeks for eight weeks, e.g., prior to administration of the dose of about 900 mg of eculizumab, or an antigen-binding fragment thereof, and once every three months thereafter. In one embodiment, the dsRNA agent is administered to the subject at a 400 mg fixed dose of the dsRNA agent once every weeks for eight weeks, e.g., prior to administration of the dose of about 900 mg of eculizumab, or an antigen-binding fragment thereof, and once every six months thereafter. In one embodiment, the dsRNA agent is chronically administered to the subject at a 400 mg fixed dose of the dsRNA agent once every week.

[0031] In another aspect, the present invention provides methods for treating, e.g., chronically treating, a subject having paroxysmal nocturnal hemoglobinuria (PNH), comprising administering to a subject having PNH and previously treated with eculizumab, a 400 mg fixed dose of a double stranded ribonucleic acid (dsRNA) agent for inhibiting expression of complement component C5 once every month; and administering to the subject, a dose of about 300 mg to about 900 mg of eculizumab, or an antigen-binding fragment thereof, once every four weeks, wherein the dsRNA agent comprises a sense strand and an antisense strand, and wherein the sense strand comprises 5′-asasGfcAfaGfaUfAfUfuUfuuAfuAfaua-3′ (SEQ ID NO:2876) and the antisense strand comprises 5′-usAfsUfuAfuaAfaAfauaUfcUfuGfcuususudTdT-3′ (SEQ ID NO:2889), wherein a, g, c and u are 2′-O-methyl (2′-OMe) A, G, C, and U, respectively; Af, Gf, Cf and Uf are 2′-fluoro A, G, C and U, respectively; dT is a deoxy-thymine nucleotide; and s is a phosphorothioate linkage, thereby treating the subject. In one embodiment, the dsRNA agent is administered to the subject at a 400 mg fixed dose of the dsRNA agent once every month for two months, e.g., prior to administration of the dose of about 300 mg to about 900 mg of eculizumab, or an antigen-binding fragment thereof. In one embodiment, the dsRNA agent is administered to the subject at a 400 mg fixed dose of the dsRNA agent once every month for two months, e.g., prior to administration of the dose of about 300 mg to about 900 mg of eculizumab, or an antigen-binding fragment thereof, and once every three months thereafter. In one embodiment, the dsRNA agent is administered to the subject at a 400 mg fixed dose of the dsRNA agent once every month for two months, e.g., prior to administration of the dose of about 300 mg to about 900 mg of eculizumab, or an antigen-binding fragment thereof, and once every six months thereafter. In one embodiment, the dsRNA agent is chronically administered to the subject at a 400 mg fixed dose of the dsRNA agent once every month.

[0032] In another aspect, the present invention provides methods for treating, e.g., chronically treating, a subject having paroxysmal nocturnal hemoglobinuria (PNH), comprising administering to a subject having PNH and previously treated with eculizumab, a 400 mg fixed dose of a double stranded ribonucleic acid (dsRNA) agent for inhibiting expression of complement component C5 once every month; and administering to the subject, a dose of about 300 mg of eculizumab, or an antigen-binding fragment thereof, once every four weeks, wherein the dsRNA agent comprises a sense strand and an antisense strand, and wherein the sense strand comprises 5′-asasGfcAfaGfaUfAfUfuUfuuAfuAfaua-3′ (SEQ ID NO:2876) and the antisense strand comprises 5′-usAfsUfuAfuaAfaAfauaUfcUfuGfcuususudTdT-3′ (SEQ ID NO:2889), wherein a, g, c and u are 2′-O-methyl (2′-OMe) A, G, C, and U, respectively; Af, Gf, Cf and Uf are 2′-fluoro A, G, C and U, respectively; dT is a deoxy-thymine nucleotide; and s is a phosphorothioate linkage, thereby treating the subject. In one embodiment, the dsRNA agent is administered to the subject at a 400 mg fixed dose of the dsRNA agent once every month for two months, e.g., prior to administration of the dose of about 300 mg of eculizumab, or an antigen-binding fragment thereof. In one embodiment, the dsRNA agent is administered to the subject at a 400 mg fixed dose of the dsRNA agent once every month for two months, e.g., prior to administration of the dose of about 300 mg of eculizumab, or an antigen-binding fragment thereof, and once every three months thereafter. In one embodiment, the dsRNA agent is administered to the subject at a 400 mg fixed dose of the dsRNA agent once every month for two months, e.g., prior to administration of the dose of about 300 mg of eculizumab, or an antigen-binding fragment thereof, and once every six months thereafter. In one embodiment, the dsRNA agent is chronically administered to the subject at a 400 mg fixed dose of the dsRNA agent once every month.

[0033] In another aspect, the present invention provides methods for treating, e.g., chronically treating, a subject having paroxysmal nocturnal hemoglobinuria (PNH), comprising administering to a subject having PNH and previously treated with eculizumab, a 400 mg fixed dose of a double stranded ribonucleic acid (dsRNA) agent for inhibiting expression of complement component C5 once every month; and administering to the subject, a dose of about 600 mg of eculizumab, or an antigen-binding fragment thereof, once every four weeks, wherein the dsRNA agent comprises a sense strand and an antisense strand, and wherein the sense strand comprises 5′-asasGfcAfaGfaUfAfUfuUfuuAfuAfaua-3′ (SEQ ID NO:2876) and the antisense strand comprises 5′-usAfsUfuAfuaAfaAfauaUfcUfuGfcuususudTdT-3′ (SEQ ID NO:2889), wherein a, g, c and u are 2′-O-methyl (2′-OMe) A, G, C, and U, respectively; Af, Gf, Cf and Uf are 2′-fluoro A, G, C and U, respectively; dT is a deoxy-thymine nucleotide; and s is a phosphorothioate linkage, thereby treating the subject. In one embodiment, the dsRNA agent is administered to the subject at a 400 mg fixed dose of the dsRNA agent once every month for two months, e.g., prior to administration of the dose of about 600 mg of eculizumab, or an antigen-binding fragment thereof. In one embodiment, the dsRNA agent is administered to the subject at a 400 mg fixed dose of the dsRNA agent once every month for two months, e.g., prior to administration of the dose of about 600 mg of eculizumab, or an antigen-binding fragment thereof, and once every three months thereafter. In one embodiment, the dsRNA agent is administered to the subject at a 400 mg fixed dose of the dsRNA agent once every month for two months, e.g., prior to administration of the dose of about 600 mg of eculizumab, or an antigen-binding fragment thereof, and once every six months thereafter. In one embodiment, the dsRNA agent is chronically administered to the subject at a 400 mg fixed dose of the dsRNA agent once every month.

[0034] In another aspect, the present invention provides methods for treating, e.g., chronically treating, a subject having paroxysmal nocturnal hemoglobinuria (PNH), comprising administering to a subject having PNH and previously treated with eculizumab, a 400 mg fixed dose of a double stranded ribonucleic acid (dsRNA) agent for inhibiting expression of complement component C5 once every month; and administering to the subject, a dose of about 900 mg of eculizumab, or an antigen-binding fragment thereof, once every four weeks, wherein the dsRNA agent comprises a sense strand and an antisense strand, and wherein the sense strand comprises 5′-asasGfcAfaGfaUfAfUfuUfuuAfuAfaua-3′ (SEQ ID NO:2876) and the antisense strand comprises 5′-usAfsUfuAfuaAfaAfauaUfcUfuGfcuususudTdT-3′ (SEQ ID NO:2889), wherein a, g, c and u are 2′-O-methyl (2′-OMe) A, G, C, and U, respectively; Af, Gf, Cf and Uf are 2′-fluoro A, G, C and U, respectively; dT is a deoxy-thymine nucleotide; and s is a phosphorothioate linkage, thereby treating the subject. In one embodiment, the dsRNA agent is administered to the subject at a 400 mg fixed dose of the dsRNA agent once every month for two months, e.g., prior to administration of the dose of about 900 mg of eculizumab, or an antigen-binding fragment thereof. In one embodiment, the dsRNA agent is administered to the subject at a 400 mg fixed dose of the dsRNA agent once every month for two months, e.g., prior to administration of the dose of about 300 mg of eculizumab, or an antigen-binding fragment thereof, and once every three months thereafter. In one embodiment, the dsRNA agent is administered to the subject at a 400 mg fixed dose of the dsRNA agent once every month for two months, e.g., prior to administration of the dose of about 300 mg of eculizumab, or an antigen-binding fragment thereof, and once every six months thereafter. In one embodiment, the dsRNA agent is chronically administered to the subject at a 400 mg fixed dose of the dsRNA agent once every month. In one aspect, the present invention provides methods for treating, e.g., chronically treating, a subject having paroxysmal nocturnal hemoglobinuria (PNH). The methods include administering to a subject having PNH and previously treated with eculizumab a 400 mg fixed dose of a double stranded ribonucleic acid (dsRNA) agent for inhibiting expression of complement component C5 once every week for 2-8 weeks; and administering to the subject, a dose of about 300 mg to about 900 mg of eculizumab, or an antigen-binding fragment thereof, once every four weeks, wherein the dsRNA agent comprises a sense strand and an antisense strand, and wherein the sense strand comprises 5′-asasGfcAfaGfaUfAfUfuUfuuAfuAfaua-3′ (SEQ ID NO:2876) and the antisense strand comprises 5′-usAfsUfuAfuaAfaAfauaUfcUfuGfcuususudTdT-3′ (SEQ ID NO:2889), wherein a, g, c and u are 2′-O-methyl (2′-OMe) A, G, C, and U, respectively; Af, Gf, Cf and Uf are 2′-fluoro A, G, C and U, respectively; dT is a deoxy-thymine nucleotide; and s is a phosphorothioate linkage, thereby treating the subject. In one embodiment, the dsRNA agent is administered to the subject a 400 mg fixed dose once every week for 2-8 weeks prior to the administration of the dose of about 300 mg to about 900 mg of eculizumab, or an antigen-binding fragment thereof, to the subject. In one embodiment, the dsRNA agent is administered to the subject a 400 mg fixed dose once every week for 2-8 weeks prior to the administration of the dose of about 300 mg to about 900 mg of eculizumab, or an antigen-binding fragment thereof, to the subject, and once every month thereafter. In one embodiment, the dsRNA agent is administered to the subject a 400 mg fixed dose once every week for 2-8 weeks prior to the administration of the dose of about 300 mg to about 900 mg of eculizumab, or an antigen-binding fragment thereof, to the subject, and once every three months thereafter. In one embodiment, the dsRNA agent is administered to the subject a 400 mg fixed dose once every week for 2-8 weeks prior to the administration of the dose of about 300 mg to about 900 mg of eculizumab, or an antigen-binding fragment thereof, to the subject, and once every six months thereafter. In one embodiment, the dsRNA agent is chronically administered to the subject at a 400 mg fixed dose of the dsRNA agent once every week.

[0035] In one aspect, the present invention provides methods for treating, e.g., chronically treating, a subject having paroxysmal nocturnal hemoglobinuria (PNH). The methods include administering to a subject having PNH and previously treated with eculizumab a 400 mg fixed dose of a double stranded ribonucleic acid (dsRNA) agent for inhibiting expression of complement component C5 once every week for 2-8 weeks; and administering to the subject, a dose of about 300 mg of eculizumab, or an antigen-binding fragment thereof, once every four weeks, wherein the dsRNA agent comprises a sense strand and an antisense strand, and wherein the sense strand comprises 5′-asasGfcAfaGfaUfAfUfuUfuuAfuAfaua-3′ (SEQ ID NO:2876) and the antisense strand comprises 5′-usAfsUfuAfuaAfaAfauaUfcUfuGfcuususudTdT-3′ (SEQ ID NO:2889), wherein a, g, c and u are 2′-O-methyl (2′-OMe) A, G, C, and U, respectively; Af, Gf, Cf and Uf are 2′-fluoro A, G, C and U, respectively; dT is a deoxy-thymine nucleotide; and s is a phosphorothioate linkage, thereby treating the subject. In one embodiment, the dsRNA agent is administered to the subject a 400 mg fixed dose once every week for 2-8 weeks prior to the administration of the dose of about 300 mg of eculizumab, or an antigen-binding fragment thereof, to the subject. In one embodiment, the dsRNA agent is administered to the subject a 400 mg fixed dose once every week for 2-8 weeks prior to the administration of the dose of about 300 mg of eculizumab, or an antigen-binding fragment thereof, to the subject, and once every month thereafter. In one embodiment, the dsRNA agent is administered to the subject a 400 mg fixed dose once every week for 2-8 weeks prior to the administration of the dose of about 300 mg of eculizumab, or an antigen-binding fragment thereof, to the subject, and once every three months thereafter. In one embodiment, the dsRNA agent is administered to the subject a 400 mg fixed dose once every week for 2-8 weeks prior to the administration of the dose of about 300 mg of eculizumab, or an antigen-binding fragment thereof, to the subject, and once every six months thereafter. In one embodiment, the dsRNA agent is chronically administered to the subject at a 400 mg fixed dose of the dsRNA agent once every week.

[0036] In one aspect, the present invention provides methods for treating, e.g., chronically treating, a subject having paroxysmal nocturnal hemoglobinuria (PNH). The methods include administering to a subject having PNH and previously treated with eculizumab a 400 mg fixed dose of a double stranded ribonucleic acid (dsRNA) agent for inhibiting expression of complement component C5 once every week for 2-8 weeks; and administering to the subject, a dose of about 600 mg of eculizumab, or an antigen-binding fragment thereof, once very four weeks, wherein the dsRNA agent comprises a sense strand and an antisense strand, and wherein the sense strand comprises 5′-asasGfcAfaGfaUfAfUfuUfuuAfuAfaua-3′ (SEQ ID NO:2876) and the antisense strand comprises 5′-usAfsUfuAfuaAfaAfauaUfcUfuGfcuususudTdT-3′ (SEQ ID NO:2889), wherein a, g, c and u are 2′-O-methyl (2′-OMe) A, G, C, and U, respectively; Af, Gf, Cf and Uf are 2′-fluoro A, G, C and U, respectively; dT is a deoxy-thymine nucleotide; and s is a phosphorothioate linkage, thereby treating the subject. In one embodiment, the dsRNA agent is administered to the subject a 400 mg fixed dose once every week for 2-8 weeks prior to the administration of the dose of about 600 mg of eculizumab, or an antigen-binding fragment thereof, to the subject. In one embodiment, the dsRNA agent is administered to the subject a 400 mg fixed dose once every week for 2-8 weeks prior to the administration of the dose of about 600 mg of eculizumab, or an antigen-binding fragment thereof, to the subject, and once every month thereafter. In one embodiment, the dsRNA agent is administered to the subject a 400 mg fixed dose once every week for 2-8 weeks prior to the administration of the dose of about 600 mg of eculizumab, or an antigen-binding fragment thereof, to the subject, and once every three months thereafter. In one embodiment, the dsRNA agent is administered to the subject a 400 mg fixed dose once every week for 2-8 weeks prior to the administration of the dose of about 600 mg of eculizumab, or an antigen-binding fragment thereof, to the subject, and once every six months thereafter. In one embodiment, the dsRNA agent is chronically administered to the subject at a 400 mg fixed dose of the dsRNA agent once every week.

[0037] In one aspect, the present invention provides methods for treating, e.g., chronically treating, a subject having paroxysmal nocturnal hemoglobinuria (PNH). The methods include administering to a subject having PNH and previously treated with eculizumab a 400 mg fixed dose of a double stranded ribonucleic acid (dsRNA) agent for inhibiting expression of complement component C5 once every week for 2-8 weeks; and administering to the subject, a dose of about 900 mg of eculizumab, or an antigen-binding fragment thereof, once every four weeks, wherein the dsRNA agent comprises a sense strand and an antisense strand, and wherein the sense strand comprises 5′-asasGfcAfaGfaUfAfUfuUfuuAfuAfaua-3′ (SEQ ID NO:2876) and the antisense strand comprises 5′-usAfsUfuAfuaAfaAfauaUfcUfuGfcuususudTdT-3′ (SEQ ID NO:2889), wherein a, g, c and u are 2′-O-methyl (2′-OMe) A, G, C, and U, respectively; Af, Gf, Cf and Uf are 2′-fluoro A, G, C and U, respectively; dT is a deoxy-thymine nucleotide; and s is a phosphorothioate linkage, thereby treating the subject. In one embodiment, the dsRNA agent is administered to the subject a 400 mg fixed dose once every week for 2-8 weeks prior to the administration of the dose of about 900 mg of eculizumab, or an antigen-binding fragment thereof, to the subject. In one embodiment, the dsRNA agent is administered to the subject a 400 mg fixed dose once every week for 2-8 weeks prior to the administration of the dose of about 900 mg of eculizumab, or an antigen-binding fragment thereof, to the subject, and once every month thereafter. In one embodiment, the dsRNA agent is administered to the subject a 400 mg fixed dose once every week for 2-8 weeks prior to the administration of the dose of about 900 mg of eculizumab, or an antigen-binding fragment thereof, to the subject, and once every three months thereafter. In one embodiment, the dsRNA agent is administered to the subject a 400 mg fixed dose once every week for 2-8 weeks prior to the administration of the dose of about 900 mg of eculizumab, or an antigen-binding fragment thereof, to the subject, and once every six months thereafter. In one embodiment, the dsRNA agent is chronically administered to the subject at a 400 mg fixed dose of the dsRNA agent once every week. In another aspect, the present invention provides methods for treating, e.g., chronically treating, a subject having paroxysmal nocturnal hemoglobinuria (PNH). The methods include administering to a subject having PNH and previously treated with eculizumab, a 400 mg fixed dose of a double stranded ribonucleic acid (dsRNA) agent for inhibiting expression of complement component C5 once every month for 1-2 months; and administering to the subject, a dose of about 300 mg to about 900 mg of eculizumab, or an antigen-binding fragment thereof, once every four weeks, wherein the dsRNA agent comprises a sense strand and an antisense strand, and wherein the sense strand comprises 5′-asasGfcAfaGfaUfAfUfuUfuuAfuAfaua-3′ (SEQ ID NO:2876) and the antisense strand comprises 5′-usAfsUfuAfuaAfaAfauaUfcUfuGfcuususudTdT-3′ (SEQ ID NO:2889), wherein a, g, c and u are 2′-O-methyl (2′-OMe) A, G, C, and U, respectively; Af, Gf, Cf and Uf are 2′-fluoro A, G, C and U, respectively; dT is a deoxy-thymine nucleotide; and s is a phosphorothioate linkage, thereby treating the subject. In one embodiment, the dsRNA agent is administered to the subject at a 400 mg fixed dose once every month for 1-2 months prior to the administration of the dose of about 300 mg to about 900 mg of eculizumab, or an antigen-binding fragment thereof, to the subject. In one embodiment, the dsRNA agent is administered to the subject at a 400 mg fixed dose once every month for 1-2 months prior to the administration of the dose of about 300 mg to about 900 mg of eculizumab, or an antigen-binding fragment thereof, to the subject, and once every three months thereafter. In one embodiment, the dsRNA agent is administered to the subject at a 400 mg fixed dose once every month for 1-2 months prior to the administration of the dose of about 300 mg to about 900 mg of eculizumab, or an antigen-binding fragment thereof, to the subject, and once every six months thereafter. In one embodiment, the dsRNA agent is chronically administered to the subject at a 400 mg fixed dose of the dsRNA agent once every month.

[0038] In another aspect, the present invention provides methods for treating, e.g., chronically treating, a subject having paroxysmal nocturnal hemoglobinuria (PNH). The methods include administering to a subject having PNH and previously treated with eculizumab, a 400 mg fixed dose of a double stranded ribonucleic acid (dsRNA) agent for inhibiting expression of complement component C5 once every month for 1-2 months; and administering to the subject, a dose of about 300 mg of eculizumab, or an antigen-binding fragment thereof, once every four weeks, wherein the dsRNA agent comprises a sense strand and an antisense strand, and wherein the sense strand comprises 5′-asasGfcAfaGfaUfAfUfuUfuuAfuAfaua-3′ (SEQ ID NO:2876) and the antisense strand comprises 5′-usAfsUfuAfuaAfaAfauaUfcUfuGfcuususudTdT-3′ (SEQ ID NO:2889), wherein a, g, c and u are 2′-O-methyl (2′-OMe) A, G, C, and U, respectively; Af, Gf, Cf and Uf are 2′-fluoro A, G, C and U, respectively; dT is a deoxy-thymine nucleotide; and s is a phosphorothioate linkage, thereby treating the subject. In one embodiment, the dsRNA agent is administered to the subject at a 400 mg fixed dose once every month for 1-2 months prior to the administration of the dose of about 300 mg of eculizumab, or an antigen-binding fragment thereof, to the subject. In one embodiment, the dsRNA agent is administered to the subject at a 400 mg fixed dose once every month for 1-2 months prior to the administration of the dose of about 300 mg of eculizumab, or an antigen-binding fragment thereof, to the subject, and once every three months thereafter. In one embodiment, the dsRNA agent is administered to the subject at a 400 mg fixed dose once every month for 1-2 months prior to the administration of the dose of about 300 mg of eculizumab, or an antigen-binding fragment thereof, to the subject, and once every six months thereafter. In one embodiment, the dsRNA agent is chronically administered to the subject at a 400 mg fixed dose of the dsRNA agent once every month.

[0039] In another aspect, the present invention provides methods for treating, e.g., chronically treating, a subject having paroxysmal nocturnal hemoglobinuria (PNH). The methods include administering to a subject having PNH and previously treated with eculizumab, a 400 mg fixed dose of a double stranded ribonucleic acid (dsRNA) agent for inhibiting expression of complement component C5 once every month for 1-2 months; and administering to the subject, a dose of about 600 mg of eculizumab, or an antigen-binding fragment thereof, once every four weeks, wherein the dsRNA agent comprises a sense strand and an antisense strand, and wherein the sense strand comprises 5′-asasGfcAfaGfaUfAfUfuUfuuAfuAfaua-3′ (SEQ ID NO:2876) and the antisense strand comprises 5′-usAfsUfuAfuaAfaAfauaUfcUfuGfcuususudTdT-3′ (SEQ ID NO:2889), wherein a, g, c and u are 2′-O-methyl (2′-OMe) A, G, C, and U, respectively; Af, Gf, Cf and Uf are 2′-fluoro A, G, C and U, respectively; dT is a deoxy-thymine nucleotide; and s is a phosphorothioate linkage, thereby treating the subject. In one embodiment, the dsRNA agent is administered to the subject at a 400 mg fixed dose once every month for 1-2 months prior to the administration of the dose of about 600 mg of eculizumab, or an antigen-binding fragment thereof, to the subject. In one embodiment, the dsRNA agent is administered to the subject at a 400 mg fixed dose once every month for 1-2 months prior to the administration of the dose of about 600 mg of eculizumab, or an antigen-binding fragment thereof, to the subject, and once every three months thereafter. In one embodiment, the dsRNA agent is administered to the subject at a 400 mg fixed dose once every month for 1-2 months prior to the administration of the dose of about 600 mg of eculizumab, or an antigen-binding fragment thereof, to the subject, and once every six months thereafter. In one embodiment, the dsRNA agent is chronically administered to the subject at a 400 mg fixed dose of the dsRNA agent once every month.

[0040] In another aspect, the present invention provides methods for treating, e.g., chronically treating, a subject having paroxysmal nocturnal hemoglobinuria (PNH). The methods include

administering to a subject having PNH and previously treated with eculizumab, a 400 mg fixed dose of a double stranded ribonucleic acid (dsRNA) agent for inhibiting expression of complement component C5 once every month for 1-2 months; and administering to the subject, a dose of about 900 mg of eculizumab, or an antigen-binding fragment thereof, once every four weeks, wherein the dsRNA agent comprises a sense strand and an antisense strand, and wherein the sense strand comprises 5′-asasGfcAfaGfaUfAfUfuUfuuAfuAfaua-3′ (SEQ ID NO:2876) and the antisense strand comprises 5′-usAfsUfuAfuaAfaAfauaUfcUfuGfcuususudTdT-3′ (SEQ ID NO:2889), wherein a, g, c and u are 2′-O-methyl (2′-OMe) A, G, C, and U, respectively; Af, Gf, Cf and Uf are 2′-fluoro A, G, C and U, respectively; dT is a deoxy-thymine nucleotide; and s is a phosphorothioate linkage, thereby treating the subject. In one embodiment, the dsRNA agent is administered to the subject at a 400 mg fixed dose once every month for 1-2 months prior to the administration of the dose of about 300 mg of eculizumab, or an antigen-binding fragment thereof, to the subject. In one embodiment, the dsRNA agent is administered to the subject at a 400 mg fixed dose once every month for 1-2 months prior to the administration of the dose of about 300 mg of eculizumab, or an antigen-binding fragment thereof, to the subject, and once every three months thereafter. In one embodiment, the dsRNA agent is administered to the subject at a 400 mg fixed dose once every month for 1-2 months prior to the administration of the dose of about 300 mg of eculizumab, or an antigen-binding fragment thereof, to the subject, and once every six months thereafter. In one embodiment, the dsRNA agent is chronically administered to the subject at a 400 mg fixed dose of the dsRNA agent once every month.

[0041] In one aspect, the present invention provides methods for treating, e.g., chronically treating, a subject having paroxysmal nocturnal hemoglobinuria (PNH). The methods include administering to a subject having PNH and previously treated with eculizumab a 200 mg fixed dose of a double stranded ribonucleic acid (dsRNA) agent for inhibiting expression of complement component C5 once every week; and administering to the subject, a dose of about 300 mg to about 900 mg of eculizumab, or an antigen-binding fragment thereof, once every four weeks, wherein the dsRNA agent comprises a sense strand and an antisense strand, and wherein the sense strand comprises 5′-asasGfcAfaGfaUfAfUfuUfuuAfuAfaua-3′ (SEQ ID NO:2876) and the antisense strand comprises 5′-usAfsUfuAfuaAfaAfauaUfcUfuGfcuususudTdT-3′ (SEQ ID NO:2889), wherein a, g, c and u are 2′-O-methyl (2′-OMe) A, G, C, and U, respectively; Af, Gf, Cf and Uf are 2′-fluoro A, G, C and U, respectively; dT is a deoxy-thymine nucleotide; and s is a phosphorothioate linkage, thereby treating the subject. In one embodiment, the dsRNA agent is administered to the subject at a 200 mg fixed dose of the dsRNA agent once every week for eight weeks, e.g., prior to the administration of the dose of about 300 mg to about 900 mg of eculizumab, or an antigen-binding fragment thereof, to the subject. In another embodiment, the dsRNA agent is administered to the subject at a 200 mg fixed dose of the dsRNA agent once every week for twelve weeks, e.g., prior to the administration of the dose of about 300 mg to about 900 mg of eculizumab, or an antigen-binding fragment thereof, to the subject. In one embodiment, the dsRNA agent is administered to the subject at a 200 mg fixed dose of the dsRNA agent once every week for eight weeks, e.g., prior to administration of the dose of about 300 mg to about 900 mg of eculizumab, or an antigen-binding fragment thereof, and once every month thereafter. In one embodiment, the dsRNA agent is administered to the subject at a 200 mg fixed dose of the dsRNA agent once every weeks for eight weeks, e.g., prior to administration of the dose of about 300 mg to about 900 mg of eculizumab, or an antigen-binding fragment thereof, and once every three months thereafter. In one embodiment, the dsRNA agent is administered to the subject at a 200 mg fixed dose of the dsRNA agent once every weeks for eight weeks, e.g., prior to administration of the dose of about 300 mg to about 900 mg of eculizumab, or an antigen-binding fragment thereof, and once every six months thereafter. In one embodiment, the dsRNA agent is administered to the subject at a 200 mg fixed dose of the dsRNA agent once every week for twelve weeks, e.g., prior to administration of the dose of about 300 mg to about 900 mg of eculizumab, or an antigen-binding fragment thereof, and once every month thereafter. In one embodiment, the dsRNA agent is administered to the subject at a 200 mg fixed dose of the dsRNA agent once every weeks for twelve weeks, e.g., prior to administration of the dose of about 300 mg to about 900 mg of eculizumab, or an antigen-binding fragment thereof, and once every three months thereafter. In one embodiment, the dsRNA agent is administered to the subject at a 200 mg fixed dose of the dsRNA agent once every weeks for twelve weeks, e.g., prior to administration of the dose of about 300 mg to about 900 mg of eculizumab, or an antigen-binding fragment thereof, and once every six months thereafter. In one embodiment, the dsRNA agent is chronically administered to the subject at a 200 mg fixed dose of the dsRNA agent once every week.

[0042] In one aspect, the present invention provides methods for treating, e.g., chronically treating, a subject having paroxysmal nocturnal hemoglobinuria (PNH). The methods include administering to a subject having PNH and previously treated with eculizumab a 200 mg fixed dose of a double stranded ribonucleic acid (dsRNA) agent for inhibiting expression of complement component C5 once every week; and administering to the subject, a dose of about 300 mg of eculizumab, or an antigen-binding fragment thereof, once every four weeks, wherein the dsRNA agent comprises a sense strand and an antisense strand, and wherein the sense strand comprises 5′-asasGfcAfaGfaUfAfUfuUfuuAfuAfaua-3′ (SEQ ID NO:2876) and the antisense strand comprises 5′-usAfsUfuAfuaAfaAfauaUfcUfuGfcuususudTdT-3′ (SEQ ID NO:2889), wherein a, g, c and u are 2′-O-methyl (2′-OMe) A, G, C, and U, respectively; Af, Gf, Cf and Uf are 2′-fluoro A, G, C and U, respectively; dT is a deoxy-thymine nucleotide; and s is a phosphorothioate linkage, thereby treating the subject. In one embodiment, the dsRNA agent is administered to the subject at a 200 mg fixed dose of the dsRNA agent once every week for eight weeks, e.g., prior to the administration of the dose of about 300 mg of eculizumab, or an antigen-binding fragment thereof, to the subject. In another embodiment, the dsRNA agent is administered to the subject at a 200 mg fixed dose of the dsRNA agent once every week for twelve weeks, e.g., prior to the administration of the dose of about 300 mg of eculizumab, or an antigen-binding fragment thereof, to the subject. In one embodiment, the dsRNA agent is administered to the subject at a 200 mg fixed dose of the dsRNA agent once every week for eight weeks, e.g., prior to administration of the dose of about 300 mg of eculizumab, or an antigen-binding fragment thereof, and once every month thereafter. In one embodiment, the dsRNA agent is administered to the subject at a 200 mg fixed dose of the dsRNA agent once every weeks for eight weeks, e.g., prior to administration of the dose of about 300 mg of eculizumab, or an antigen-binding fragment thereof, and once every three months thereafter. In one embodiment, the dsRNA agent is administered to the subject at a 200 mg fixed dose of the dsRNA agent once every weeks for eight weeks, e.g., prior to administration of the dose of about 300 mg of eculizumab, or an antigen-binding fragment thereof, and once every six months thereafter. In one embodiment, the dsRNA agent is administered to the subject at a 200 mg fixed dose of the dsRNA agent once every week for twelve weeks, e.g., prior to administration of the dose of about 300 mg of eculizumab, or an antigen-binding fragment thereof, and once every month thereafter. In one embodiment, the dsRNA agent is administered to the subject at a 200 mg fixed dose of the dsRNA agent once every weeks for twelve weeks, e.g., prior to administration of the dose of about 300 mg of eculizumab, or an antigen-binding fragment thereof, and once every three months thereafter. In one embodiment, the dsRNA agent is administered to the subject at a 200 mg fixed dose of the dsRNA agent once every weeks for twelve weeks, e.g., prior to administration of the dose of about 300 mg of eculizumab, or an antigen-binding fragment thereof, and once every six months thereafter. In one embodiment, the dsRNA agent is chronically administered to the subject at a 200 mg fixed dose of the dsRNA agent once every week.

[0043] In one aspect, the present invention provides methods for treating, e.g., chronically treating, a subject having paroxysmal nocturnal hemoglobinuria (PNH). The methods include administering to a subject having PNH and previously treated with eculizumab a 200 mg fixed dose of a double stranded ribonucleic acid (dsRNA) agent for inhibiting expression of complement component C5 once every week; and administering to the subject, a dose of about 600 mg of eculizumab, or an antigen-binding fragment thereof, once every four weeks, wherein the dsRNA agent comprises a sense strand and an antisense strand, and wherein the sense strand comprises 5′-asasGfcAfaGfaUfAfUfuUfuuAfuAfaua-3′ (SEQ ID NO:2876) and the antisense strand comprises 5′-usAfsUfuAfuaAfaAfauaUfcUfuGfcuususudTdT-3′ (SEQ ID NO:2889), wherein a, g, c and u are 2′-O-methyl (2′-OMe) A, G, C, and U, respectively; Af, Gf, Cf and Uf are 2′-fluoro A, G, C and U, respectively; dT is a deoxy-thymine nucleotide; and s is a phosphorothioate linkage, thereby treating the subject. In one embodiment, the dsRNA agent is administered to the subject at a 200 mg fixed dose of the dsRNA agent once every week for eight weeks, e.g., prior to the administration of the dose of about 600 mg of eculizumab, or an antigen-binding fragment thereof, to the subject. In another embodiment, the dsRNA agent is administered to the subject at a 200 mg fixed dose of the dsRNA agent once every week for twelve weeks, e.g., prior to the administration of the dose of about 600 mg of eculizumab, or an antigen-binding fragment thereof, to the subject. In one embodiment, the dsRNA agent is administered to the subject at a 200 mg fixed dose of the dsRNA agent once every week for eight weeks, e.g., prior to administration of the dose of about 600 mg tmg of eculizumab, or an antigen-binding fragment thereof, and once every month thereafter. In one embodiment, the dsRNA agent is administered to the subject at a 200 mg fixed dose of the dsRNA agent once every weeks for eight weeks, e.g., prior to administration of the dose of about 600 mg of eculizumab, or an antigen-binding fragment thereof, and once every three months thereafter. In one embodiment, the dsRNA agent is administered to the subject at a 200 mg fixed dose of the dsRNA agent once every weeks for eight weeks, e.g., prior to administration of the dose of about 600 mg of eculizumab, or an antigen-binding fragment thereof, and once every six months thereafter. In one embodiment, the dsRNA agent is administered to the subject at a 200 mg fixed dose of the dsRNA agent once every week for twelve weeks, e.g., prior to administration of the dose of about 600 mg of eculizumab, or an antigen-binding fragment thereof, and once every month thereafter. In one embodiment, the dsRNA agent is administered to the subject at a 200 mg fixed dose of the dsRNA agent once every weeks for twelve weeks, e.g., prior to administration of the dose of about 600 mg of eculizumab, or an antigen-binding fragment thereof, and once every three months thereafter. In one embodiment, the dsRNA agent is administered to the subject at a 200 mg fixed dose of the dsRNA agent once every weeks for twelve weeks, e.g., prior to administration of the dose of about 600 mg of eculizumab, or an antigen-binding fragment thereof, and once every six months thereafter. In one embodiment, the dsRNA agent is chronically administered to the subject at a 200 mg fixed dose of the dsRNA agent once every week.

[0044] In one aspect, the present invention provides methods for treating, e.g., chronically treating, a subject having paroxysmal nocturnal hemoglobinuria (PNH). The methods include administering to a subject having PNH and previously treated with eculizumab a 200 mg fixed dose of a double stranded ribonucleic acid (dsRNA) agent for inhibiting expression of complement component C5 once every week; and administering to the subject, a dose of about 900 mg of eculizumab, or an antigen-binding fragment thereof, once every four weeks, wherein the dsRNA agent comprises a sense strand and an antisense strand, and wherein the sense strand comprises 5′-asasGfcAfaGfaUfAfUfuUfuuAfuAfaua-3′ (SEQ ID NO:2876) and the antisense strand comprises 5′-usAfsUfuAfuaAfaAfauaUfcUfuGfcuususudTdT-3′ (SEQ ID NO:2889), wherein a, g, c and u are 2′-O-methyl (2′-OMe) A, G, C, and U, respectively; Af, Gf, Cf and Uf are 2′-fluoro A, G, C and U, respectively; dT is a deoxy-thymine nucleotide; and s is a phosphorothioate linkage, thereby treating the subject. In one embodiment, the dsRNA agent is administered to the subject at a 200 mg fixed dose of the dsRNA agent once every week for eight weeks, e.g., prior to the administration of the dose of about 900 mg of eculizumab, or an antigen-binding fragment thereof, to the subject. In another embodiment, the dsRNA agent is administered to the subject at a 200 mg fixed dose of the dsRNA agent once every week for twelve weeks, e.g., prior to the administration of the dose of about 900 mg of eculizumab, or an antigen-binding fragment thereof, to the subject. In one embodiment, the dsRNA agent is administered to the subject at a 200 mg fixed dose of the dsRNA agent once every week for eight weeks, e.g., prior to administration of the dose of about 900 mg of eculizumab, or an antigen-binding fragment thereof, and once every month thereafter. In one embodiment, the dsRNA agent is administered to the subject at a 200 mg fixed dose of the dsRNA agent once every weeks for eight weeks, e.g., prior to administration of the dose of about 900 mg of eculizumab, or an antigen-binding fragment thereof, and once every three months thereafter. In one embodiment, the dsRNA agent is administered to the subject at a 200 mg fixed dose of the dsRNA agent once every weeks for eight weeks, e.g., prior to administration of the dose of about 900 mg of eculizumab, or an antigen-binding fragment thereof, and once every six months thereafter. In one embodiment, the dsRNA agent is administered to the subject at a 200 mg fixed dose of the dsRNA agent once every week for twelve weeks, e.g., prior to administration of the dose of about 900 mg of eculizumab, or an antigen-binding fragment thereof, and once every month thereafter. In one embodiment, the dsRNA agent is administered to the subject at a 200 mg fixed dose of the dsRNA agent once every weeks for twelve weeks, e.g., prior to administration of the dose of about 900 mg of eculizumab, or an antigen-binding fragment thereof, and once every three months thereafter. In one embodiment, the dsRNA agent is administered to the subject at a 200 mg fixed dose of the dsRNA agent once every weeks for twelve weeks, e.g., prior to administration of the dose of about 900 mg of eculizumab, or an antigen-binding fragment thereof, and once every six months thereafter. In one embodiment, the dsRNA agent is chronically administered to the subject at a 200 mg fixed dose of the dsRNA agent once every week.

[0045] In another aspect, the present invention provides methods for treating, e.g., chronically treating, a subject having paroxysmal nocturnal hemoglobinuria (PNH). The methods include administering to a subject having PNH and previously treated with eculizumab, a 200 mg fixed dose of a double stranded ribonucleic acid (dsRNA) agent for inhibiting expression of complement component C5 once every month; and administering to the subject, a dose of about 300 mg to about 900 mg of eculizumab, or an antigen-binding fragment thereof, once every four weeks, wherein the dsRNA agent comprises a sense strand and an antisense strand, and wherein the sense strand comprises 5′-asasGfcAfaGfaUfAfUfuUfuuAfuAfaua-3′ (SEQ ID NO:2876) and the antisense strand comprises 5′-usAfsUfuAfuaAfaAfauaUfcUfuGfcuususudTdT-3′ (SEQ ID NO:2889), wherein a, g, c and u are 2′-O-methyl (2′-OMe) A, G, C, and U, respectively; Af, Gf, Cf and Uf are 2′-fluoro A, G, C and U, respectively; dT is a deoxy-thymine nucleotide; and s is a phosphorothioate linkage, thereby treating the subject. In one embodiment, the dsRNA agent is administered to the subject at a 200 mg fixed dose of the dsRNA agent once every month for two months, e.g., prior to the administration of the dose of about 300 mg to about 900 mg of eculizumab, or an antigen-binding fragment thereof, to the subject. In one embodiment, the dsRNA agent is administered to the subject at a 200 mg fixed dose of the dsRNA agent once every month for two months, e.g., prior to the administration of the dose of about 300 mg to about 900 mg of eculizumab, or an antigen-binding fragment thereof, to the subject, and once every three months thereafter. In one embodiment, the dsRNA agent is administered to the subject at a 200 mg fixed dose of the dsRNA agent once every month for two months, e.g., prior to the administration of the dose of about 300 mg to about 900 mg of eculizumab, or an antigen-binding fragment thereof, to the subject, and once every six months thereafter. In another embodiment, the dsRNA agent is administered to the subject at a 200 mg fixed dose of the dsRNA agent once every month for three months, e.g., prior to the administration of the dose of about 300 mg to about 900 mg of eculizumab, or an antigen-binding fragment thereof, to the subject. In one embodiment, the dsRNA agent is administered to the subject at a 200 mg fixed dose of the dsRNA agent once every month for three months, e.g., prior to the administration of the dose of about 300 mg to about 900 mg of eculizumab, or an antigen-binding fragment thereof, to the subject, and once every three months thereafter. In one embodiment, the dsRNA agent is administered to the subject at a 200 mg fixed dose of the dsRNA agent once every month for three months, e.g., prior to the administration of the dose of about 300 mg to about 900 mg of eculizumab, or an antigen-binding fragment thereof, to the subject, and once every six months thereafter. In one embodiment, the dsRNA agent is chronically administered to the subject at a 200 mg fixed dose of the dsRNA agent once every month.

[0046] In another aspect, the present invention provides methods for treating, e.g., chronically treating, a subject having paroxysmal nocturnal hemoglobinuria (PNH). The methods include administering to a subject having PNH and previously treated with eculizumab, a 200 mg fixed dose of a double stranded ribonucleic acid (dsRNA) agent for inhibiting expression of complement component C5 once every month; and administering to the subject, a dose of about 300 mg of eculizumab, or an antigen-binding fragment thereof, once every four weeks, wherein the dsRNA agent comprises a sense strand and an antisense strand, and wherein the sense strand comprises 5′-asasGfcAfaGfaUfAfUfuUfuuAfuAfaua-3′ (SEQ ID NO:2876) and the antisense strand comprises 5′-usAfsUfuAfuaAfaAfauaUfcUfuGfcuususudTdT-3′ (SEQ ID NO:2889), wherein a, g, c and u are 2′-O-methyl (2′-OMe) A, G, C, and U, respectively; Af, Gf, Cf and Uf are 2′-fluoro A, G, C and U, respectively; dT is a deoxy-thymine nucleotide; and s is a phosphorothioate linkage, thereby treating the subject. In one embodiment, the dsRNA agent is administered to the subject at a 200 mg fixed dose of the dsRNA agent once every month for two months, e.g., prior to the administration of the dose of about 300 mg of eculizumab, or an antigen-binding fragment thereof, to the subject. In one embodiment, the dsRNA agent is administered to the subject at a 200 mg fixed dose of the dsRNA agent once every month for two months, e.g., prior to the administration of the dose of about 300 mg of eculizumab, or an antigen-binding fragment thereof, to the subject, and once every three months thereafter. In one embodiment, the dsRNA agent is administered to the subject at a 200 mg fixed dose of the dsRNA agent once every month for two months, e.g., prior to the administration of the dose of about 300 mg of eculizumab, or an antigen-binding fragment thereof, to the subject, and once every six months thereafter. In another embodiment, the dsRNA agent is administered to the subject at a 200 mg fixed dose of the dsRNA agent once every month for three months, e.g., prior to the administration of the dose of about 300 mg of eculizumab, or an antigen-binding fragment thereof, to the subject. In one embodiment, the dsRNA agent is administered to the subject at a 200 mg fixed dose of the dsRNA agent once every month for three months, e.g., prior to the administration of the dose of about 300 mg of eculizumab, or an antigen-binding fragment thereof, to the subject, and once every three months thereafter. In one embodiment, the dsRNA agent is administered to the subject at a 200 mg fixed dose of the dsRNA agent once every month for three months, e.g., prior to the administration of the dose of about 300 mg of eculizumab, or an antigen-binding fragment thereof, to the subject, and once every six months thereafter. In one embodiment, the dsRNA agent is chronically administered to the subject at a 200 mg fixed dose of the dsRNA agent once every month.

[0047] In another aspect, the present invention provides methods for treating, e.g., chronically treating, a subject having paroxysmal nocturnal hemoglobinuria (PNH). The methods include administering to a subject having PNH and previously treated with eculizumab, a 200 mg fixed dose of a double stranded ribonucleic acid (dsRNA) agent for inhibiting expression of complement component C5 once every month; and administering to the subject, a dose of about 600 mg of eculizumab, or an antigen-binding fragment thereof, once every four weeks, wherein the dsRNA agent comprises a sense strand and an antisense strand, and wherein the sense strand comprises 5′-asasGfcAfaGfaUfAfUfuUfuuAfuAfaua-3′ (SEQ ID NO:2876) and the antisense strand comprises 5′-usAfsUfuAfuaAfaAfauaUfcUfuGfcuususudTdT-3′ (SEQ ID NO:2889), wherein a, g, c and u are 2′-O-methyl (2′-OMe) A, G, C, and U, respectively; Af, Gf, Cf and Uf are 2′-fluoro A, G, C and U, respectively; dT is a deoxy-thymine nucleotide; and s is a phosphorothioate linkage, thereby treating the subject. In one embodiment, the dsRNA agent is administered to the subject at a 200 mg fixed dose of the dsRNA agent once every month for two months, e.g., prior to the administration of the dose of about 600 mg of eculizumab, or an antigen-binding fragment thereof, to the subject. In one embodiment, the dsRNA agent is administered to the subject at a 200 mg fixed dose of the dsRNA agent once every month for two months, e.g., prior to the administration of the dose of about 600 mg of eculizumab, or an antigen-binding fragment thereof, to the subject, and once every three months thereafter. In one embodiment, the dsRNA agent is administered to the subject at a 200 mg fixed dose of the dsRNA agent once every month for two months, e.g., prior to the administration of the dose of about 600 mg of eculizumab, or an antigen-binding fragment thereof, to the subject, and once every six months thereafter. In another embodiment, the dsRNA agent is administered to the subject at a 200 mg fixed dose of the dsRNA agent once every month for three months, e.g., prior to the administration of the dose of about 600 mg of eculizumab, or an antigen-binding fragment thereof, to the subject. In one embodiment, the dsRNA agent is administered to the subject at a 200 mg fixed dose of the dsRNA agent once every month for three months, e.g., prior to the administration of the dose of about 600 mg of eculizumab, or an antigen-binding fragment thereof, to the subject, and once every three months thereafter. In one embodiment, the dsRNA agent is administered to the subject at a 200 mg fixed dose of the dsRNA agent once every month for three months, e.g., prior to the administration of the dose of about 600 mg of eculizumab, or an antigen-binding fragment thereof, to the subject, and once every six months thereafter. In one embodiment, the dsRNA agent is chronically administered to the subject at a 200 mg fixed dose of the dsRNA agent once every month.

[0048] In another aspect, the present invention provides methods for treating, e.g., chronically treating, a subject having paroxysmal nocturnal hemoglobinuria (PNH). The methods include administering to a subject having PNH and previously treated with eculizumab, a 200 mg fixed dose of a double stranded ribonucleic acid (dsRNA) agent for inhibiting expression of complement component C5 once every month; and administering to the subject, a dose of about 900 mg of eculizumab, or an antigen-binding fragment thereof, once every four weeks, wherein the dsRNA agent comprises a sense strand and an antisense strand, and wherein the sense strand comprises 5′-asasGfcAfaGfaUfAfUfuUfuuAfuAfaua-3′ (SEQ ID NO:2876) and the antisense strand comprises 5′-usAfsUfuAfuaAfaAfauaUfcUfuGfcuususudTdT-3′ (SEQ ID NO:2889), wherein a, g, c and u are 2′-O-methyl (2′-OMe) A, G, C, and U, respectively; Af, Gf, Cf and Uf are 2′-fluoro A, G, C and U, respectively; dT is a deoxy-thymine nucleotide; and s is a phosphorothioate linkage, thereby treating the subject. In one embodiment, the dsRNA agent is administered to the subject at a 200 mg fixed dose of the dsRNA agent once every month for two months, e.g., prior to the administration of the dose of about 900 mg of eculizumab, or an antigen-binding fragment thereof, to the subject. In one embodiment, the dsRNA agent is administered to the subject at a 200 mg fixed dose of the dsRNA agent once every month for two months, e.g., prior to the administration of the dose of about 900 mg of eculizumab, or an antigen-binding fragment thereof, to the subject, and once every three months thereafter. In one embodiment, the dsRNA agent is administered to the subject at a 200 mg fixed dose of the dsRNA agent once every month for two months, e.g., prior to the administration of the dose of about 900 mg of eculizumab, or an antigen-binding fragment thereof, to the subject, and once every six months thereafter. In another embodiment, the dsRNA agent is administered to the subject at a 200 mg fixed dose of the dsRNA agent once every month for three months, e.g., prior to the administration of the dose of about 900 mg of eculizumab, or an antigen-binding fragment thereof, to the subject. In one embodiment, the dsRNA agent is administered to the subject at a 200 mg fixed dose of the dsRNA agent once every month for three months, e.g., prior to the administration of the dose of about 900 mg of eculizumab, or an antigen-binding fragment thereof, to the subject, and once every three months thereafter. In one embodiment, the dsRNA agent is administered to the subject at a 200 mg fixed dose of the dsRNA agent once every month for three months, e.g., prior to the administration of the dose of about 900 mg of eculizumab, or an antigen-binding fragment thereof, to the subject, and once every six months thereafter. In one embodiment, the dsRNA agent is chronically administered to the subject at a 200 mg fixed dose of the dsRNA agent once every month.

[0049] In one aspect, the present invention provides methods for treating, e.g., chronically treating, a subject having paroxysmal nocturnal hemoglobinuria (PNH). The methods include

administering to a subject having PNH and that has not responded to treatment with eculizumab a 200 mg fixed dose of a double stranded ribonucleic acid (dsRNA) agent for inhibiting expression of complement component C5 once every week; and administering to the subject, a dose of about 300 mg to about 900 mg of eculizumab, or an antigen-binding fragment thereof, once every four weeks, wherein the dsRNA agent comprises a sense strand and an antisense strand, and wherein the sense strand comprises 5′-asasGfcAfaGfaUfAfUfuUfuuAfuAfaua-3′ (SEQ ID NO:2876) and the antisense strand comprises 5′-usAfsUfuAfuaAfaAfauaUfcUfuGfcuususudTdT-3′ (SEQ ID NO:2889), wherein a, g, c and u are 2′-O-methyl (2′-OMe) A, G, C, and U, respectively; Af, Gf, Cf and Uf are 2′-fluoro A, G, C and U, respectively; dT is a deoxy-thymine nucleotide; and s is a phosphorothioate linkage, thereby treating the subject. In one embodiment, the dsRNA agent is administered to the subject at a 200 mg fixed dose of the dsRNA agent once every week for eight weeks, e.g., prior to the administration of the dose of about 300 mg to about 900 mg of eculizumab, or an antigen-binding fragment thereof, to the subject. In another embodiment, the dsRNA agent is administered to the subject at a 200 mg fixed dose of the dsRNA agent once every week for twelve weeks, e.g., prior to the administration of the dose of about 300 mg to about 900 mg of eculizumab, or an antigen-binding fragment thereof, to the subject. In one embodiment, the dsRNA agent is administered to the subject at a 200 mg fixed dose of the dsRNA agent once every week for eight weeks, e.g., prior to administration of the dose of about 300 mg to about 900 mg of eculizumab, or an antigen-binding fragment thereof, and once every month thereafter. In one embodiment, the dsRNA agent is administered to the subject at a 200 mg fixed dose of the dsRNA agent once every weeks for eight weeks, e.g., prior to administration of the dose of about 300 mg to about 900 mg of eculizumab, or an antigen-binding fragment thereof, and once every three months thereafter. In one embodiment, the dsRNA agent is administered to the subject at a 200 mg fixed dose of the dsRNA agent once every weeks for eight weeks, e.g., prior to administration of the dose of about 300 mg to about 900 mg of eculizumab, or an antigen-binding fragment thereof, and once every six months thereafter. In one embodiment, the dsRNA agent is administered to the subject at a 200 mg fixed dose of the dsRNA agent once every week for twelve weeks, e.g., prior to administration of the dose of about 300 mg to about 900 mg of eculizumab, or an antigen-binding fragment thereof, and once every month thereafter. In one embodiment, the dsRNA agent is administered to the subject at a 200 mg fixed dose of the dsRNA agent once every weeks for twelve weeks, e.g., prior to administration of the dose of about 300 mg to about 900 mg of eculizumab, or an antigen-binding fragment thereof, and once every three months thereafter. In one embodiment, the dsRNA agent is administered to the subject at a 200 mg fixed dose of the dsRNA agent once every weeks for twelve weeks, e.g., prior to administration of the dose of about 300 mg to about 900 mg of eculizumab, or an antigen-binding fragment thereof, and once every six months thereafter. In one embodiment, the dsRNA agent is chronically administered to the subject at a 200 mg fixed dose of the dsRNA agent once every week.

[0050] In one aspect, the present invention provides methods for treating, e.g., chronically treating, a subject having paroxysmal nocturnal hemoglobinuria (PNH). The methods include

administering to a subject having PNH and that has not responded to treatment with eculizumab a 200 mg fixed dose of a double stranded ribonucleic acid (dsRNA) agent for inhibiting expression of complement component C5 once every week; and administering to the subject, a dose of about 300 mg of eculizumab, or an antigen-binding fragment thereof, once every four weeks, wherein the dsRNA agent comprises a sense strand and an antisense strand, and wherein the sense strand comprises 5′-asasGfcAfaGfaUfAfUfuUfuuAfuAfaua-3′ (SEQ ID NO:2876) and the antisense strand comprises 5′-usAfsUfuAfuaAfaAfauaUfcUfuGfcuususudTdT-3′ (SEQ ID NO:2889), wherein a, g, c and u are 2′-O-methyl (2′-OMe) A, G, C, and U, respectively; Af, Gf, Cf and Uf are 2′-fluoro A, G, C and U, respectively; dT is a deoxy-thymine nucleotide; and s is a phosphorothioate linkage, thereby treating the subject. In one embodiment, the dsRNA agent is administered to the subject at a 200 mg fixed dose of the dsRNA agent once every week for eight weeks, e.g., prior to the administration of the dose of about 300 mg of eculizumab, or an antigen-binding fragment thereof, to the subject. In another embodiment, the dsRNA agent is administered to the subject at a 200 mg fixed dose of the dsRNA agent once every week for twelve weeks, e.g., prior to the administration of the dose of about 300 mg of eculizumab, or an antigen-binding fragment thereof, to the subject. In one embodiment, the dsRNA agent is administered to the subject at a 200 mg fixed dose of the dsRNA agent once every week for eight weeks, e.g., prior to administration of the dose of about 300 mg of eculizumab, or an antigen-binding fragment thereof, and once every month thereafter. In one embodiment, the dsRNA agent is administered to the subject at a 200 mg fixed dose of the dsRNA agent once every weeks for eight weeks, e.g., prior to administration of the dose of about 300 mg of eculizumab, or an antigen-binding fragment thereof, and once every three months thereafter. In one embodiment, the dsRNA agent is administered to the subject at a 200 mg fixed dose of the dsRNA agent once every weeks for eight weeks, e.g., prior to administration of the dose of about 300 mg of eculizumab, or an antigen-binding fragment thereof, and once every six months thereafter. In one embodiment, the dsRNA agent is administered to the subject at a 200 mg fixed dose of the dsRNA agent once every week for twelve weeks, e.g., prior to administration of the dose of about 300 mg of eculizumab, or an antigen-binding fragment thereof, and once every month thereafter. In one embodiment, the dsRNA agent is administered to the subject at a 200 mg fixed dose of the dsRNA agent once every week for twelve weeks, e.g., prior to administration of the dose of about 300 mg of eculizumab, or an antigen-binding fragment thereof, and once every three months thereafter. In one embodiment, the dsRNA agent is administered to the subject at a 200 mg fixed dose of the dsRNA agent once every weeks for twelve weeks, e.g., prior to administration of the dose of about 300 mg of eculizumab, or an antigen-binding fragment thereof, and once every six months thereafter. In one embodiment, the dsRNA agent is chronically administered to the subject at a 200 mg fixed dose of the dsRNA agent once every week.

[0051] In one aspect, the present invention provides methods for treating, e.g., chronically treating, a subject having paroxysmal nocturnal hemoglobinuria (PNH). The methods include

administering to a subject having PNH and that has not responded to treatment with eculizumab a 200 mg fixed dose of a double stranded ribonucleic acid (dsRNA) agent for inhibiting expression of complement component C5 once every week; and administering to the subject, a dose of about 600 mg of eculizumab, or an antigen-binding fragment thereof, once every four weeks, wherein the dsRNA agent comprises a sense strand and an antisense strand, and wherein the sense strand comprises 5′-asasGfcAfaGfaUfAfUfuUfuuAfuAfaua-3′ (SEQ ID NO:2876) and the antisense strand comprises 5′-usAfsUfuAfuaAfaAfauaUfcUfuGfcuususudTdT-3′ (SEQ ID NO:2889), wherein a, g, c and u are 2′-O-methyl (2′-OMe) A, G, C, and U, respectively; Af, Gf, Cf and Uf are 2′-fluoro A, G, C and U, respectively; dT is a deoxy-thymine nucleotide; and s is a phosphorothioate linkage, thereby treating the subject. In one embodiment, the dsRNA agent is administered to the subject at a 200 mg fixed dose of the dsRNA agent once every week for eight weeks, e.g., prior to the administration of the dose of about 600 mg of eculizumab, or an antigen-binding fragment thereof, to the subject. In another embodiment, the dsRNA agent is administered to the subject at a 200 mg fixed dose of the dsRNA agent once every week for twelve weeks, e.g., prior to the administration of the dose of about 600 mg of eculizumab, or an antigen-binding fragment thereof, to the subject. In one embodiment, the dsRNA agent is administered to the subject at a 200 mg fixed dose of the dsRNA agent once every week for eight weeks, e.g., prior to administration of the dose of about 600 mg of eculizumab, or an antigen-binding fragment thereof, and once every month thereafter. In one embodiment, the dsRNA agent is administered to the subject at a 200 mg fixed dose of the dsRNA agent once every weeks for eight weeks, e.g., prior to administration of the dose of about 600 mg of eculizumab, or an antigen-binding fragment thereof, and once every three months thereafter. In one embodiment, the dsRNA agent is administered to the subject at a 200 mg fixed dose of the dsRNA agent once every weeks for eight weeks, e.g., prior to administration of the dose of about 600 mg of eculizumab, or an antigen-binding fragment thereof, and once every six months thereafter. In one embodiment, the dsRNA agent is administered to the subject at a 200 mg fixed dose of the dsRNA agent once every week for twelve weeks, e.g., prior to administration of the dose of about 600 mg of eculizumab, or an antigen-binding fragment thereof, and once every month thereafter. In one embodiment, the dsRNA agent is administered to the subject at a 200 mg fixed dose of the dsRNA agent once every weeks for twelve weeks, e.g., prior to administration of the dose of about 600 mg of eculizumab, or an antigen-binding fragment thereof, and once every three months thereafter. In one embodiment, the dsRNA agent is administered to the subject at a 200 mg fixed dose of the dsRNA agent once every weeks for twelve weeks, e.g., prior to administration of the dose of about 600 mg of eculizumab, or an antigen-binding fragment thereof, and once every six months thereafter. In one embodiment, the dsRNA agent is chronically administered to the subject at a 200 mg fixed dose of the dsRNA agent once every week.

[0052] In one aspect, the present invention provides methods for treating, e.g., chronically treating, a subject having paroxysmal nocturnal hemoglobinuria (PNH). The methods include

administering to a subject having PNH and that has not responded to treatment with eculizumab a 200 mg fixed dose of a double stranded ribonucleic acid (dsRNA) agent for inhibiting expression of complement component C5 once every week; and administering to the subject, a dose of about 900 mg of eculizumab, or an antigen-binding fragment thereof, once every four weeks, wherein the dsRNA agent comprises a sense strand and an antisense strand, and wherein the sense strand comprises 5′-asasGfcAfaGfaUfAfUfuUfuuAfuAfaua-3′ (SEQ ID NO:2876) and the antisense strand comprises 5′-usAfsUfuAfuaAfaAfauaUfcUfuGfcuususudTdT-3′ (SEQ ID NO:2889), wherein a, g, c and u are 2′-O-methyl (2′-OMe) A, G, C, and U, respectively; Af, Gf, Cf and Uf are 2′-fluoro A, G, C and U, respectively; dT is a deoxy-thymine nucleotide; and s is a phosphorothioate linkage, thereby treating the subject. In one embodiment, the dsRNA agent is administered to the subject at a 200 mg fixed dose of the dsRNA agent once every week for eight weeks, e.g., prior to the administration of the dose of about 900 mg of eculizumab, or an antigen-binding fragment thereof, to the subject. In another embodiment, the dsRNA agent is administered to the subject at a 200 mg fixed dose of the dsRNA agent once every week for twelve weeks, e.g., prior to the administration of the dose of about 900 mg of eculizumab, or an antigen-binding fragment thereof, to the subject. In one embodiment, the dsRNA agent is administered to the subject at a 200 mg fixed dose of the dsRNA agent once every week for eight weeks, e.g., prior to administration of the dose of about 900 mg of eculizumab, or an antigen-binding fragment thereof, and once every month thereafter. In one embodiment, the dsRNA agent is administered to the subject at a 200 mg fixed dose of the dsRNA agent once every weeks for eight weeks, e.g., prior to administration of the dose of about 900 mg of eculizumab, or an antigen-binding fragment thereof, and once every three months thereafter. In one embodiment, the dsRNA agent is administered to the subject at a 200 mg fixed dose of the dsRNA agent once every weeks for eight weeks, e.g., prior to administration of the dose of about 900 mg of eculizumab, or an antigen-binding fragment thereof, and once every six months thereafter. In one embodiment, the dsRNA agent is administered to the subject at a 200 mg fixed dose of the dsRNA agent once every week for twelve weeks, e.g., prior to administration of the dose of about 900 mg of eculizumab, or an antigen-binding fragment thereof, and once every month thereafter. In one embodiment, the dsRNA agent is administered to the subject at a 200 mg fixed dose of the dsRNA agent once every weeks for twelve weeks, e.g., prior to administration of the dose of about 900 mg of eculizumab, or an antigen-binding fragment thereof, and once every three months thereafter. In one embodiment, the dsRNA agent is administered to the subject at a 200 mg fixed dose of the dsRNA agent once every weeks for twelve weeks, e.g., prior to administration of the dose of about 900 mg of eculizumab, or an antigen-binding fragment thereof, and once every six months thereafter. In one embodiment, the dsRNA agent is chronically administered to the subject at a 200 mg fixed dose of the dsRNA agent once every week.

[0053] In another aspect, the present invention provides methods for treating, e.g., chronically treating, a subject having paroxysmal nocturnal hemoglobinuria (PNH). The methods include administering to a subject having PNH and that has not responded to treatment with eculizumab, a 200 mg fixed dose of a double stranded ribonucleic acid (dsRNA) agent for inhibiting expression of complement component C5 once every month; and administering to the subject, a dose of about 300 mg to about 900 mg of eculizumab, or an antigen-binding fragment thereof, once every four weeks, wherein the dsRNA agent comprises a sense strand and an antisense strand, and wherein the sense strand comprises 5′-asasGfcAfaGfaUfAfUfuUfuuAfuAfaua-3′ (SEQ ID NO:2876) and the antisense strand comprises 5′-usAfsUfuAfuaAfaAfauaUfcUfuGfcuususudTdT-3′ (SEQ ID NO:2889), wherein a, g, c and u are 2′-O-methyl (2′-OMe) A, G, C, and U, respectively; Af, Gf, Cf and Uf are 2′-fluoro A, G, C and U, respectively; dT is a deoxy-thymine nucleotide; and s is a phosphorothioate linkage, thereby treating the subject. In one embodiment, the dsRNA agent is administered to the subject at a 200 mg fixed dose of the dsRNA agent once every month for two months, e.g., prior to the administration of the dose of about 300 mg to about 900 mg of eculizumab, or an antigen-binding fragment thereof, to the subject. In one embodiment, the dsRNA agent is administered to the subject at a 200 mg fixed dose of the dsRNA agent once every month for two months, e.g., prior to the administration of the dose of about 300 mg to about 900 mg of eculizumab, or an antigen-binding fragment thereof, to the subject, and once every three months thereafter. In one embodiment, the dsRNA agent is administered to the subject at a 200 mg fixed dose of the dsRNA agent once every month for two months, e.g., prior to the administration of the dose of about 300 mg to about 900 mg of eculizumab, or an antigen-binding fragment thereof, to the subject, and once every six months thereafter. In another embodiment, the dsRNA agent is administered to the subject at a 200 mg fixed dose of the dsRNA agent once every month for three months, e.g., prior to the administration of the dose of about 300 mg to about 900 mg of eculizumab, or an antigen-binding fragment thereof, to the subject. In one embodiment, the dsRNA agent is administered to the subject at a 200 mg fixed dose of the dsRNA agent once every month for three months, e.g., prior to the administration of the dose of about 300 mg to about 900 mg of eculizumab, or an antigen-binding fragment thereof, to the subject, and once every three months thereafter. In one embodiment, the dsRNA agent is administered to the subject at a 200 mg fixed dose of the dsRNA agent once every month for three months, e.g., prior to the administration of the dose of about 300 mg to about 900 mg of eculizumab, or an antigen-binding fragment thereof, to the subject, and once every six months thereafter. In one embodiment, the dsRNA agent is chronically administered to the subject at a 200 mg fixed dose of the dsRNA agent once every month.

[0054] In another aspect, the present invention provides methods for treating, e.g., chronically treating, a subject having paroxysmal nocturnal hemoglobinuria (PNH). The methods include administering to a subject having PNH and that has not responded to treatment with eculizumab, a 200 mg fixed dose of a double stranded ribonucleic acid (dsRNA) agent for inhibiting expression of complement component C5 once every month; and administering to the subject, a dose of about 300 mg of eculizumab, or an antigen-binding fragment thereof, once every four weeks, wherein the dsRNA agent comprises a sense strand and an antisense strand, and wherein the sense strand comprises 5′-asasGfcAfaGfaUfAfUfuUfuuAfuAfaua-3′ (SEQ ID NO:2876) and the antisense strand comprises 5′-usAfsUfuAfuaAfaAfauaUfcUfuGfcuususudTdT-3′ (SEQ ID NO:2889), wherein a, g, c and u are 2′-O-methyl (2′-OMe) A, G, C, and U, respectively; Af, Gf, Cf and Uf are 2′-fluoro A, G, C and U, respectively; dT is a deoxy-thymine nucleotide; and s is a phosphorothioate linkage, thereby treating the subject. In one embodiment, the dsRNA agent is administered to the subject at a 200 mg fixed dose of the dsRNA agent once every month for two months, e.g., prior to the administration of the dose of about 300 mg of eculizumab, or an antigen-binding fragment thereof, to the subject. In one embodiment, the dsRNA agent is administered to the subject at a 200 mg fixed dose of the dsRNA agent once every month for two months, e.g., prior to the administration of the dose of about 300 mg of eculizumab, or an antigen-binding fragment thereof, to the subject, and once every three months thereafter. In one embodiment, the dsRNA agent is administered to the subject at a 200 mg fixed dose of the dsRNA agent once every month for two months, e.g., prior to the administration of the dose of about 300 mg of eculizumab, or an antigen-binding fragment thereof, to the subject, and once every six months thereafter. In another embodiment, the dsRNA agent is administered to the subject at a 200 mg fixed dose of the dsRNA agent once every month for three months, e.g., prior to the administration of the dose of about 300 mg of eculizumab, or an antigen-binding fragment thereof, to the subject. In one embodiment, the dsRNA agent is administered to the subject at a 200 mg fixed dose of the dsRNA agent once every month for three months, e.g., prior to the administration of the dose of about 300 mg of eculizumab, or an antigen-binding fragment thereof, to the subject, and once every three months thereafter. In one embodiment, the dsRNA agent is administered to the subject at a 200 mg fixed dose of the dsRNA agent once every month for three months, e.g., prior to the administration of the dose of about 300 mg of eculizumab, or an antigen-binding fragment thereof, to the subject, and once every six months thereafter. In one embodiment, the dsRNA agent is chronically administered to the subject at a 200 mg fixed dose of the dsRNA agent once every month.

[0055] In another aspect, the present invention provides methods for treating, e.g., chronically treating, a subject having paroxysmal nocturnal hemoglobinuria (PNH). The methods include administering to a subject having PNH and that has not responded to treatment with eculizumab, a 200 mg fixed dose of a double stranded ribonucleic acid (dsRNA) agent for inhibiting expression of complement component C5 once every month; and administering to the subject, a dose of about 600 mg of eculizumab, or an antigen-binding fragment thereof, once every four weeks, wherein the dsRNA agent comprises a sense strand and an antisense strand, and wherein the sense strand comprises 5′-asasGfcAfaGfaUfAfUfuUfuuAfuAfaua-3′ (SEQ ID NO:2876) and the antisense strand comprises 5′-usAfsUfuAfuaAfaAfauaUfcUfuGfcuususudTdT-3′ (SEQ ID NO:2889), wherein a, g, c and u are 2′-O-methyl (2′-OMe) A, G, C, and U, respectively; Af, Gf, Cf and Uf are 2′-fluoro A, G, C and U, respectively; dT is a deoxy-thymine nucleotide; and s is a phosphorothioate linkage, thereby treating the subject. In one embodiment, the dsRNA agent is administered to the subject at a 200 mg fixed dose of the dsRNA agent once every month for two months, e.g., prior to the administration of the dose of about 600 mg of eculizumab, or an antigen-binding fragment thereof, to the subject. In one embodiment, the dsRNA agent is administered to the subject at a 200 mg fixed dose of the dsRNA agent once every month for two months, e.g., prior to the administration of the dose of about 600 mg of eculizumab, or an antigen-binding fragment thereof, to the subject, and once every three months thereafter. In one embodiment, the dsRNA agent is administered to the subject at a 200 mg fixed dose of the dsRNA agent once every month for two months, e.g., prior to the administration of the dose of about 600 mg of eculizumab, or an antigen-binding fragment thereof, to the subject, and once every six months thereafter. In another embodiment, the dsRNA agent is administered to the subject at a 200 mg fixed dose of the dsRNA agent once every month for three months, e.g., prior to the administration of the dose of about 600 mg of eculizumab, or an antigen-binding fragment thereof, to the subject. In one embodiment, the dsRNA agent is administered to the subject at a 200 mg fixed dose of the dsRNA agent once every month for three months, e.g., prior to the administration of the dose of about 600 mg of eculizumab, or an antigen-binding fragment thereof, to the subject, and once every three months thereafter. In one embodiment, the dsRNA agent is administered to the subject at a 200 mg fixed dose of the dsRNA agent once every month for three months, e.g., prior to the administration of the dose of about 600 mg of eculizumab, or an antigen-binding fragment thereof, to the subject, and once every six months thereafter. In one embodiment, the dsRNA agent is chronically administered to the subject at a 200 mg fixed dose of the dsRNA agent once every month.

[0056] In another aspect, the present invention provides methods for treating, e.g., chronically treating, a subject having paroxysmal nocturnal hemoglobinuria (PNH). The methods include administering to a subject having PNH and that has not responded to treatment with eculizumab, a 200 mg fixed dose of a double stranded ribonucleic acid (dsRNA) agent for inhibiting expression of complement component C5 once every month; and administering to the subject, a dose of about 900 mg of eculizumab, or an antigen-binding fragment thereof, once every four weeks, wherein the dsRNA agent comprises a sense strand and an antisense strand, and wherein the sense strand comprises 5′-asasGfcAfaGfaUfAfUfuUfuuAfuAfaua-3′ (SEQ ID NO:2876) and the antisense strand comprises 5′-usAfsUfuAfuaAfaAfauaUfcUfuGfcuususudTdT-3′ (SEQ ID NO:2889), wherein a, g, c and u are 2′-O-methyl (2′-OMe) A, G, C, and U, respectively; Af, Gf, Cf and Uf are 2′-fluoro A, G, C and U, respectively; dT is a deoxy-thymine nucleotide; and s is a phosphorothioate linkage, thereby treating the subject. In one embodiment, the dsRNA agent is administered to the subject at a 200 mg fixed dose of the dsRNA agent once every month for two months, e.g., prior to the administration of the dose of about 900 mg of eculizumab, or an antigen-binding fragment thereof, to the subject. In one embodiment, the dsRNA agent is administered to the subject at a 200 mg fixed dose of the dsRNA agent once every month for two months, e.g., prior to the administration of the dose of about 900 mg of eculizumab, or an antigen-binding fragment thereof, to the subject, and once every three months thereafter. In one embodiment, the dsRNA agent is administered to the subject at a 200 mg fixed dose of the dsRNA agent once every month for two months, e.g., prior to the administration of the dose of about 900 mg of eculizumab, or an antigen-binding fragment thereof, to the subject, and once every six months thereafter. In another embodiment, the dsRNA agent is administered to the subject at a 200 mg fixed dose of the dsRNA agent once every month for three months, e.g., prior to the administration of the dose of about 900 mg of eculizumab, or an antigen-binding fragment thereof, to the subject. In one embodiment, the dsRNA agent is administered to the subject at a 200 mg fixed dose of the dsRNA agent once every month for three months, e.g., prior to the administration of the dose of about 900 mg of eculizumab, or an antigen-binding fragment thereof, to the subject, and once every three months thereafter. In one embodiment, the dsRNA agent is administered to the subject at a 200 mg fixed dose of the dsRNA agent once every month for three months, e.g., prior to the administration of the dose of about 900 mg of eculizumab, or an antigen-binding fragment thereof, to the subject, and once every six months thereafter. In one embodiment, the dsRNA agent is chronically administered to the subject at a 200 mg fixed dose of the dsRNA agent once every month. In one aspect, the present invention provides methods for treating, e.g., chronically treating, a subject having paroxysmal nocturnal hemoglobinuria (PNH). The methods include administering to a subject having PNH and that has not responded to treatment with eculizumab a 400 mg fixed dose of a double stranded ribonucleic acid (dsRNA) agent for inhibiting expression of complement component C5 once every week; and administering to the subject, a dose of about 300 mg to about 900 mg of eculizumab, or an antigen-binding fragment thereof, once every four weeks, wherein the dsRNA agent comprises a sense strand and an antisense strand, and wherein the sense strand comprises 5′-asasGfcAfaGfaUfAfUfuUfuuAfuAfaua-3′ (SEQ ID NO:2876) and the antisense strand comprises 5′-usAfsUfuAfuaAfaAfauaUfcUfuGfcuususudTdT-3′ (SEQ ID NO:2889), wherein a, g, c and u are 2′-O-methyl (2′-OMe) A, G, C, and U, respectively; Af, Gf, Cf and Uf are 2′-fluoro A, G, C and U, respectively; dT is a deoxy-thymine nucleotide; and s is a phosphorothioate linkage, thereby treating the subject. In one embodiment, the dsRNA agent is administered to the subject at a 400 mg fixed dose of the dsRNA agent once every week for eight weeks, e.g., prior to the administration of the dose of about 300 mg to about 900 mg of eculizumab, or an antigen-binding fragment thereof, to the subject. In another embodiment, the dsRNA agent is administered to the subject at a 400 mg fixed dose of the dsRNA agent once every week for twelve weeks, e.g., prior to the administration of the dose of about 300 mg to about 900 mg of eculizumab, or an antigen-binding fragment thereof, to the subject. In one embodiment, the dsRNA agent is administered to the subject at a 400 mg fixed dose of the dsRNA agent once every week for eight weeks, e.g., prior to administration of the dose of about 300 mg to about 900 mg of eculizumab, or an antigen-binding fragment thereof, and once every month thereafter. In one embodiment, the dsRNA agent is administered to the subject at a 400 mg fixed dose of the dsRNA agent once every weeks for eight weeks, e.g., prior to administration of the dose of about 300 mg to about 900 mg of eculizumab, or an antigen-binding fragment thereof, and once every three months thereafter. In one embodiment, the dsRNA agent is administered to the subject at a 400 mg fixed dose of the dsRNA agent once every weeks for eight weeks, e.g., prior to administration of the dose of about 300 mg to about 900 mg of eculizumab, or an antigen-binding fragment thereof, and once every six months thereafter. In one embodiment, the dsRNA agent is administered to the subject at a 400 mg fixed dose of the dsRNA agent once every week for twelve weeks, e.g., prior to administration of the dose of about 300 mg to about 900 mg of eculizumab, or an antigen-binding fragment thereof, and once every month thereafter. In one embodiment, the dsRNA agent is administered to the subject at a 400 mg fixed dose of the dsRNA agent once every weeks for twelve weeks, e.g., prior to administration of the dose of about 300 mg to about 900 mg of eculizumab, or an antigen-binding fragment thereof, and once every three months thereafter. In one embodiment, the dsRNA agent is administered to the subject at a 400 mg fixed dose of the dsRNA agent once every weeks for twelve weeks, e.g., prior to administration of the dose of about 300 mg to about 900 mg of eculizumab, or an antigen-binding fragment thereof, and once every six months thereafter. In one embodiment, the dsRNA agent is chronically administered to the subject at a 400 mg fixed dose of the dsRNA agent once every week.

[0057] In one aspect, the present invention provides methods for treating, e.g., chronically treating, a subject having paroxysmal nocturnal hemoglobinuria (PNH). The methods include administering to a subject having PNH and that has not responded to treatment with eculizumab a 400 mg fixed dose of a double stranded ribonucleic acid (dsRNA) agent for inhibiting expression of complement component C5 once every week; and administering to the subject, a dose of about 300 mg of eculizumab, or an antigen-binding fragment thereof, once every four weeks, wherein the dsRNA agent comprises a sense strand and an antisense strand, and wherein the sense strand comprises 5′-asasGfcAfaGfaUfAfUfuUfuuAfuAfaua-3′ (SEQ ID NO:2876) and the antisense strand comprises 5′-usAfsUfuAfuaAfaAfauaUfcUfuGfcuususudTdT-3′ (SEQ ID NO:2889), wherein a, g, c and u are 2′-O-methyl (2′-OMe) A, G, C, and U, respectively; Af, Gf, Cf and Uf are 2′-fluoro A, G, C and U, respectively; dT is a deoxy-thymine nucleotide; and s is a phosphorothioate linkage, thereby treating the subject. In one embodiment, the dsRNA agent is administered to the subject at a 400 mg fixed dose of the dsRNA agent once every week for eight weeks, e.g., prior to the administration of the dose of about 300 mg of eculizumab, or an antigen-binding fragment thereof, to the subject. In another embodiment, the dsRNA agent is administered to the subject at a 400 mg fixed dose of the dsRNA agent once every week for twelve weeks, e.g., prior to the administration of the dose of about 300 mg of eculizumab, or an antigen-binding fragment thereof, to the subject. In one embodiment, the dsRNA agent is administered to the subject at a 400 mg fixed dose of the dsRNA agent once every week for eight weeks, e.g., prior to administration of the dose of about 300 mg eculizumab, or an antigen-binding fragment thereof, and once every month thereafter. In one embodiment, the dsRNA agent is administered to the subject at a 400 mg fixed dose of the dsRNA agent once every weeks for eight weeks, e.g., prior to administration of the dose of about 300 mg of eculizumab, or an antigen-binding fragment thereof, and once every three months thereafter. In one embodiment, the dsRNA agent is administered to the subject at a 400 mg fixed dose of the dsRNA agent once every weeks for eight weeks, e.g., prior to administration of the dose of about 300 mg of eculizumab, or an antigen-binding fragment thereof, and once every six months thereafter. In one embodiment, the dsRNA agent is administered to the subject at a 400 mg fixed dose of the dsRNA agent once every week for twelve weeks, e.g., prior to administration of the dose of about 300 mg of eculizumab, or an antigen-binding fragment thereof, and once every month thereafter. In one embodiment, the dsRNA agent is administered to the subject at a 400 mg fixed dose of the dsRNA agent once every weeks for twelve weeks, e.g., prior to administration of the dose of about 300 mg of eculizumab, or an antigen-binding fragment thereof, and once every three months thereafter. In one embodiment, the dsRNA agent is administered to the subject at a 400 mg fixed dose of the dsRNA agent once every weeks for twelve weeks, e.g., prior to administration of the dose of about 300 mg of eculizumab, or an antigen-binding fragment thereof, and once every six months thereafter. In one embodiment, the dsRNA agent is chronically administered to the subject at a 400 mg fixed dose of the dsRNA agent once every week.

[0058] In one aspect, the present invention provides methods for treating, e.g., chronically treating, a subject having paroxysmal nocturnal hemoglobinuria (PNH). The methods include administering to a subject having PNH and that has not responded to treatment with eculizumab a 400 mg fixed dose of a double stranded ribonucleic acid (dsRNA) agent for inhibiting expression of complement component C5 once every week; and administering to the subject, a dose of about 600 mg of eculizumab, or an antigen-binding fragment thereof, once every four weeks, wherein the dsRNA agent comprises a sense strand and an antisense strand, and wherein the sense strand comprises 5′-asasGfcAfaGfaUfAfUfuUfuuAfuAfaua-3′ (SEQ ID NO:2876) and the antisense strand comprises 5′-usAfsUfuAfuaAfaAfauaUfcUfuGfcuususudTdT-3′ (SEQ ID NO:2889), wherein a, g, c and u are 2′-O-methyl (2′-OMe) A, G, C, and U, respectively; Af, Gf, Cf and Uf are 2′-fluoro A, G, C and U, respectively; dT is a deoxy-thymine nucleotide; and s is a phosphorothioate linkage, thereby treating the subject. In one embodiment, the dsRNA agent is administered to the subject at a 400 mg fixed dose of the dsRNA agent once every week for eight weeks, e.g., prior to the administration of the dose of about 600 mg of eculizumab, or an antigen-binding fragment thereof, to the subject. In another embodiment, the dsRNA agent is administered to the subject at a 400 mg fixed dose of the dsRNA agent once every week for twelve weeks, e.g., prior to the administration of the dose of about 600 mg of eculizumab, or an antigen-binding fragment thereof, to the subject. In one embodiment, the dsRNA agent is administered to the subject at a 400 mg fixed dose of the dsRNA agent once every week for eight weeks, e.g., prior to administration of the dose of about 600 mg eculizumab, or an antigen-binding fragment thereof, and once every month thereafter. In one embodiment, the dsRNA agent is administered to the subject at a 400 mg fixed dose of the dsRNA agent once every weeks for eight weeks, e.g., prior to administration of the dose of about 600 mg of eculizumab, or an antigen-binding fragment thereof, and once every three months thereafter. In one embodiment, the dsRNA agent is administered to the subject at a 400 mg fixed dose of the dsRNA agent once every weeks for eight weeks, e.g., prior to administration of the dose of about 600 mg of eculizumab, or an antigen-binding fragment thereof, and once every six months thereafter. In one embodiment, the dsRNA agent is administered to the subject at a 400 mg fixed dose of the dsRNA agent once every week for twelve weeks, e.g., prior to administration of the dose of about 600 mg of eculizumab, or an antigen-binding fragment thereof, and once every month thereafter. In one embodiment, the dsRNA agent is administered to the subject at a 400 mg fixed dose of the dsRNA agent once every weeks for twelve weeks, e.g., prior to administration of the dose of about 600 mg of eculizumab, or an antigen-binding fragment thereof, and once every three months thereafter. In one embodiment, the dsRNA agent is administered to the subject at a 400 mg fixed dose of the dsRNA agent once every weeks for twelve weeks, e.g., prior to administration of the dose of about 600 mg of eculizumab, or an antigen-binding fragment thereof, and once every six months thereafter. In one embodiment, the dsRNA agent is chronically administered to the subject at a 400 mg fixed dose of the dsRNA agent once every week.

[0059] In one aspect, the present invention provides methods for treating, e.g., chronically treating, a subject having paroxysmal nocturnal hemoglobinuria (PNH). The methods include administering to a subject having PNH and that has not responded to treatment with eculizumab a 400 mg fixed dose of a double stranded ribonucleic acid (dsRNA) agent for inhibiting expression of complement component C5 once every week; and administering to the subject, a dose of about 900 mg of eculizumab, or an antigen-binding fragment thereof, once every four weeks, wherein the dsRNA agent comprises a sense strand and an antisense strand, and wherein the sense strand comprises 5′-asasGfcAfaGfaUfAfUfuUfuuAfuAfaua-3′ (SEQ ID NO:2876) and the antisense strand comprises 5′-usAfsUfuAfuaAfaAfauaUfcUfuGfcuususudTdT-3′ (SEQ ID NO:2889), wherein a, g, c and u are 2′-O-methyl (2′-OMe) A, G, C, and U, respectively; Af, Gf, Cf and Uf are 2′-fluoro A, G, C and U, respectively; dT is a deoxy-thymine nucleotide; and s is a phosphorothioate linkage, thereby treating the subject. In one embodiment, the dsRNA agent is administered to the subject at a 400 mg fixed dose of the dsRNA agent once every week for eight weeks, e.g., prior to the administration of the dose of about 900 mg of eculizumab, or an antigen-binding fragment thereof, to the subject. In another embodiment, the dsRNA agent is administered to the subject at a 400 mg fixed dose of the dsRNA agent once every week for twelve weeks, e.g., prior to the administration of the dose of about 900 mg of eculizumab, or an antigen-binding fragment thereof, to the subject. In one embodiment, the dsRNA agent is administered to the subject at a 400 mg fixed dose of the dsRNA agent once every week for eight weeks, e.g., prior to administration of the dose of about 900 mg eculizumab, or an antigen-binding fragment thereof, and once every month thereafter. In one embodiment, the dsRNA agent is administered to the subject at a 400 mg fixed dose of the dsRNA agent once every weeks for eight weeks, e.g., prior to administration of the dose of about 900 mg of eculizumab, or an antigen-binding fragment thereof, and once every three months thereafter. In one embodiment, the dsRNA agent is administered to the subject at a 400 mg fixed dose of the dsRNA agent once every weeks for eight weeks, e.g., prior to administration of the dose of about 900 mg of eculizumab, or an antigen-binding fragment thereof, and once every six months thereafter. In one embodiment, the dsRNA agent is administered to the subject at a 400 mg fixed dose of the dsRNA agent once every week for twelve weeks, e.g., prior to administration of the dose of about 900 mg of eculizumab, or an antigen-binding fragment thereof, and once every month thereafter. In one embodiment, the dsRNA agent is administered to the subject at a 400 mg fixed dose of the dsRNA agent once every weeks for twelve weeks, e.g., prior to administration of the dose of about 900 mg of eculizumab, or an antigen-binding fragment thereof, and once every three months thereafter. In one embodiment, the dsRNA agent is administered to the subject at a 400 mg fixed dose of the dsRNA agent once every weeks for twelve weeks, e.g., prior to administration of the dose of about 900 mg of eculizumab, or an antigen-binding fragment thereof, and once every six months thereafter. In one embodiment, the dsRNA agent is chronically administered to the subject at a 400 mg fixed dose of the dsRNA agent once every week.

[0060] In another aspect, the present invention provides methods for treating, e.g., chronically treating, a subject having paroxysmal nocturnal hemoglobinuria (PNH). The methods include administering to a subject having PNH and that has not responded to treatment with eculizumab, a 400 mg fixed dose of a double stranded ribonucleic acid (dsRNA) agent for inhibiting expression of complement component C5 once every month; and administering to the subject, a dose of about 300 mg to about 900 mg of eculizumab, or an antigen-binding fragment thereof, once every four weeks, wherein the dsRNA agent comprises a sense strand and an antisense strand, and wherein the sense strand comprises 5′-asasGfcAfaGfaUfAfUfuUfuuAfuAfaua-3′ (SEQ ID NO:2876) and the antisense strand comprises 5′-usAfsUfuAfuaAfaAfauaUfcUfuGfcuususudTdT-3′ (SEQ ID NO:2889), wherein a, g, c and u are 2′-O-methyl (2′-OMe) A, G, C, and U, respectively; Af, Gf, Cf and Uf are 2′-fluoro A, G, C and U, respectively; dT is a deoxy-thymine nucleotide; and s is a phosphorothioate linkage, thereby treating the subject. In one embodiment, the dsRNA agent is administered to the subject at a 400 mg fixed dose of the dsRNA agent once every month for two months, e.g., prior to the administration of the dose of about 300 mg to about 900 mg of eculizumab, or an antigen-binding fragment thereof, to the subject. In one embodiment, the dsRNA agent is administered to the subject at a 400 mg fixed dose of the dsRNA agent once every month for two months, e.g., prior to the administration of the dose of about 300 mg to about 900 mg of eculizumab, or an antigen-binding fragment thereof, to the subject, and once every three months thereafter. In one embodiment, the dsRNA agent is administered to the subject at a 400 mg fixed dose of the dsRNA agent once every month for two months, e.g., prior to the administration of the dose of about 300 mg to about 900 mg of eculizumab, or an antigen-binding fragment thereof, to the subject, and once every six months thereafter. In another embodiment, the dsRNA agent is administered to the subject at a 400 mg fixed dose of the dsRNA agent once every month for three months, e.g., prior to the administration of the dose of about 300 mg to about 900 mg of eculizumab, or an antigen-binding fragment thereof, to the subject. In one embodiment, the dsRNA agent is administered to the subject at a 400 mg fixed dose of the dsRNA agent once every month for three months, e.g., prior to the administration of the dose of about 300 mg to about 900 mg of eculizumab, or an antigen-binding fragment thereof, to the subject, and once every three months thereafter. In one embodiment, the dsRNA agent is administered to the subject at a 400 mg fixed dose of the dsRNA agent once every month for three months, e.g., prior to the administration of the dose of about 300 mg to about 900 mg of eculizumab, or an antigen-binding fragment thereof, to the subject, and once every six months thereafter. In one embodiment, the dsRNA agent is chronically administered to the subject at a 400 mg fixed dose of the dsRNA agent once every month. In another aspect, the present invention provides methods for treating, e.g., chronically treating, a subject having paroxysmal nocturnal hemoglobinuria (PNH). The methods include administering to a subject having PNH and that has not responded to treatment with eculizumab, a 400 mg fixed dose of a double stranded ribonucleic acid (dsRNA) agent for inhibiting expression of complement component C5 once every month; and administering to the subject, a dose of about 300 mg of eculizumab, or an antigen-binding fragment thereof, once every four weeks, wherein the dsRNA agent comprises a sense strand and an antisense strand, and wherein the sense strand comprises 5′-asasGfcAfaGfaUfAfUfuUfuuAfuAfaua-3′ (SEQ ID NO:2876) and the antisense strand comprises 5′-usAfsUfuAfuaAfaAfauaUfcUfuGfcuususudTdT-3′ (SEQ ID NO:2889), wherein a, g, c and u are 2′-O-methyl (2′-OMe) A, G, C, and U, respectively; Af, Gf, Cf and Uf are 2′-fluoro A, G, C and U, respectively; dT is a deoxy-thymine nucleotide; and s is a phosphorothioate linkage, thereby treating the subject. In one embodiment, the dsRNA agent is administered to the subject at a 400 mg fixed dose of the dsRNA agent once every month for two months, e.g., prior to the administration of the dose of about 300 mg of eculizumab, or an antigen-binding fragment thereof, to the subject. In one embodiment, the dsRNA agent is administered to the subject at a 400 mg fixed dose of the dsRNA agent once every month for two months, e.g., prior to the administration of the dose of about 300 mg of eculizumab, or an antigen-binding fragment thereof, to the subject, and once every three months thereafter. In one embodiment, the dsRNA agent is administered to the subject at a 400 mg fixed dose of the dsRNA agent once every month for two months, e.g., prior to the administration of the dose of about 300 mg of eculizumab, or an antigen-binding fragment thereof, to the subject, and once every six months thereafter. In another embodiment, the dsRNA agent is administered to the subject at a 400 mg fixed dose of the dsRNA agent once every month for three months, e.g., prior to the administration of the dose of about 300 mg of eculizumab, or an antigen-binding fragment thereof, to the subject. In one embodiment, the dsRNA agent is administered to the subject at a 400 mg fixed dose of the dsRNA agent once every month for three months, e.g., prior to the administration of the dose of about 300 mg of eculizumab, or an antigen-binding fragment thereof, to the subject, and once every three months thereafter. In one embodiment, the dsRNA agent is administered to the subject at a 400 mg fixed dose of the dsRNA agent once every month for three months, e.g., prior to the administration of the dose of about 300 mg of eculizumab, or an antigen-binding fragment thereof, to the subject, and once every six months thereafter. In one embodiment, the dsRNA agent is chronically administered to the subject at a 400 mg fixed dose of the dsRNA agent once every month.

[0061] In another aspect, the present invention provides methods for treating, e.g., chronically treating, a subject having paroxysmal nocturnal hemoglobinuria (PNH). The methods include administering to a subject having PNH and that has not responded to treatment with eculizumab, a 400 mg fixed dose of a double stranded ribonucleic acid (dsRNA) agent for inhibiting expression of complement component C5 once every month; and administering to the subject, a dose of about 600 mg of eculizumab, or an antigen-binding fragment thereof, once every four weeks, wherein the dsRNA agent comprises a sense strand and an antisense strand, and wherein the sense strand comprises 5′-asasGfcAfaGfaUfAfUfuUfuuAfuAfaua-3′ (SEQ ID NO:2876) and the antisense strand comprises 5′-usAfsUfuAfuaAfaAfauaUfcUfuGfcuususudTdT-3′ (SEQ ID NO:2889), wherein a, g, c and u are 2′-O-methyl (2′-OMe) A, G, C, and U, respectively; Af, Gf, Cf and Uf are 2′-fluoro A, G, C and U, respectively; dT is a deoxy-thymine nucleotide; and s is a phosphorothioate linkage, thereby treating the subject. In one embodiment, the dsRNA agent is administered to the subject at a 400 mg fixed dose of the dsRNA agent once every month for two months, e.g., prior to the administration of the dose of about 600 mg of eculizumab, or an antigen-binding fragment thereof, to the subject. In one embodiment, the dsRNA agent is administered to the subject at a 400 mg fixed dose of the dsRNA agent once every month for two months, e.g., prior to the administration of the dose of about 600 mg of eculizumab, or an antigen-binding fragment thereof, to the subject, and once every three months thereafter. In one embodiment, the dsRNA agent is administered to the subject at a 400 mg fixed dose of the dsRNA agent once every month for two months, e.g., prior to the administration of the dose of about 600 mg of eculizumab, or an antigen-binding fragment thereof, to the subject, and once every six months thereafter. In another embodiment, the dsRNA agent is administered to the subject at a 400 mg fixed dose of the dsRNA agent once every month for three months, e.g., prior to the administration of the dose of about 600 mg of eculizumab, or an antigen-binding fragment thereof, to the subject. In one embodiment, the dsRNA agent is administered to the subject at a 400 mg fixed dose of the dsRNA agent once every month for three months, e.g., prior to the administration of the dose of about 600 mg of eculizumab, or an antigen-binding fragment thereof, to the subject, and once every three months thereafter. In one embodiment, the dsRNA agent is administered to the subject at a 400 mg fixed dose of the dsRNA agent once every month for three months, e.g., prior to the administration of the dose of about 600 mg of eculizumab, or an antigen-binding fragment thereof, to the subject, and once every six months thereafter. In one embodiment, the dsRNA agent is chronically administered to the subject at a 400 mg fixed dose of the dsRNA agent once every month.

[0062] In another aspect, the present invention provides methods for treating, e.g., chronically treating, a subject having paroxysmal nocturnal hemoglobinuria (PNH). The methods include administering to a subject having PNH and that has not responded to treatment with eculizumab, a 400 mg fixed dose of a double stranded ribonucleic acid (dsRNA) agent for inhibiting expression of complement component C5 once every month; and administering to the subject, a dose of about 900 mg of eculizumab, or an antigen-binding fragment thereof, wherein the dsRNA agent comprises a sense strand and an antisense strand, and wherein the sense strand comprises 5′-asasGfcAfaGfaUfAfUfuUfuuAfuAfaua-3′ (SEQ ID NO:2876) and the antisense strand comprises 5′-usAfsUfuAfuaAfaAfauaUfcUfuGfcuususudTdT-3′ (SEQ ID NO:2889), wherein a, g, c and u are 2′-O-methyl (2′-OMe) A, G, C, and U, respectively; Af, Gf, Cf and Uf are 2′-fluoro A, G, C and U, respectively; dT is a deoxy-thymine nucleotide; and s is a phosphorothioate linkage, thereby treating the subject. In one embodiment, the dsRNA agent is administered to the subject at a 400 mg fixed dose of the dsRNA agent once every month for two months, e.g., prior to the administration of the dose of about 900 mg of eculizumab, or an antigen-binding fragment thereof, to the subject. In one embodiment, the dsRNA agent is administered to the subject at a 400 mg fixed dose of the dsRNA agent once every month for two months, e.g., prior to the administration of the dose of about 900 mg of eculizumab, or an antigen-binding fragment thereof, to the subject, and once every three months thereafter. In one embodiment, the dsRNA agent is administered to the subject at a 400 mg fixed dose of the dsRNA agent once every month for two months, e.g., prior to the administration of the dose of about 900 mg of eculizumab, or an antigen-binding fragment thereof, to the subject, and once every six months thereafter. In another embodiment, the dsRNA agent is administered to the subject at a 400 mg fixed dose of the dsRNA agent once every month for three months, e.g., prior to the administration of the dose of about 900 mg of eculizumab, or an antigen-binding fragment thereof, to the subject. In one embodiment, the dsRNA agent is administered to the subject at a 400 mg fixed dose of the dsRNA agent once every month for three months, e.g., prior to the administration of the dose of about 900 mg of eculizumab, or an antigen-binding fragment thereof, to the subject, and once every three months thereafter. In one embodiment, the dsRNA agent is administered to the subject at a 400 mg fixed dose of the dsRNA agent once every month for three months, e.g., prior to the administration of the dose of about 900 mg of eculizumab, or an antigen-binding fragment thereof, to the subject, and once every six months thereafter. In one embodiment, the dsRNA agent is chronically administered to the subject at a 400 mg fixed dose of the dsRNA agent once every month.

[0063] In some embodiments, the dose of eculizumab, or an antigen-binding fragment thereof, is about 10%, 15%, 20%, 25%, 30%, 35%, 40%, 45%, 50%, 55%, 60%, 65%, 70%, or 75% of the eculizumab maintenance label dose. In one embodiment, the dose of eculizumab, or an antigen-binding fragment thereof, is about 25%-75%, 25%-70%, 25%-65%, 25%-60%, 30%-75%, 30%-70%, 30%-65%, 30%-60%, 25%-50%, 25%-40% or 25%-30% of the eculizumab maintenance label dose.

[0064] In some embodiments, the frequency of administration of eculizumab is reduced as compared to the frequency of administration required by the label. In some aspects, eculizumab is administered once every four weeks, every 2 months, every 3 months, every 4 months, every 5 months or every 6 months.

[0065] In some embodiments, eculizumab, or an antigen-binding fragment thereof, is administered to the subject as a 300 mg fixed dose once a month. In some embodiments, eculizumab, or an antigen-binding fragment thereof, is administered to the subject as a 600 mg fixed dose once a month. In some embodiments, eculizumab, or an antigen-binding fragment thereof, is administered to the subject as a 900 mg fixed dose every other week. In other embodiments, the eculizumab, or an antigen-binding fragment thereof, is administered to the subject as a 1200 mg fixed dose for four weeks, followed by a 900 mg fixed dose every other week.

[0066] In some embodiments, the eculizumab, or an antigen-binding fragment thereof, is administered to the eculizumab naïve subject as a 300 mg fixed dose once every four weeks. In some embodiments, the eculizumab, or an antigen-binding fragment thereof, is administered to the eculizxumab naïve subject as a 600 mg fixed dose once every four weeks. In other embodiments, the eculizumab, or an antigen-binding fragment thereof, is administered to the subject previously treated with eculizumab as a 900 mg fixed dose once every four weeks.

[0067] In one embodiment, the previous treatment of eculizumab or an antigen-binding fragment thereof, comprised administration to the subject of a 900 mg fixed dose of eculizumab twice weekly. In one embodiment, the eculizumab treatment that the subject did not respond to comprised administered to the subject of a 1200 mg fixed dose for four weeks.

[0068] In some aspects, the dsRNA agent and the eculizumab, or an antigen-binding fragment thereof, are administered to the subject simultaneously. In other aspects, the dsRNA agent is administered to the subject before the eculizumab, or an antigen-binding fragment thereof. In still other aspects, the eculizumab, or an antigen-binding fragment thereof, is administered to the subject before the dsRNA agent.

[0069] In some embodiments, the treatment prevents breakthrough hemolysis in the subject.

[0070] In some embodiments, the treatment reduces the mean maximum C5 mRNA level by at least about 98% relative to baseline, e.g., at least about 99% relative to the baseline.

[0071] In some embodiments, the treatment lowers the minimum residual C5 level to about 1.0 micrograms/mL or below, e.g., about 0.9 micrograms/mL or below, 0.8 micrograms/mL or below, 0.7 micrograms/mL or below, 0.6 micrograms/mL or below, 0.5 micrograms/mL or below, 0.4 micrograms/mL or below, 0.3 micrograms/mL or below, 0.2 micrograms/mL or below or 0.1 micrograms/mL or below.

[0072] In some aspects, the treatment lowers the classical complement pathway (CCP) activity by at least about 94% relative to baseline, e.g., at least about 95%, at least about 96%, at least about 97%, at least about 98% or at least about 99% relative to baseline.

[0073] In some embodiments, the treatment lowers the alternative complement pathway (CAP) activity by at least about 94% relative to baseline, e.g., at least about 95%, at least about 96%, at least about 97%, at least about 98% or at least about 99% relative to baseline.

[0074] In certain aspects, the treatment inhibits the mean maximum hemolysis, as measured by inhibition of sheep red blood cell hemolysis, by at least about 75% relative to baseline, e.g., at least about 76%, at least about 77%, at least about 78%, at least about 79%, at least about 80%, at least about 81%, at least about 82%, at least about 83%, at least about 84%, at least about 85%, at least about 86%, at least about 87%, at least about 88%, at least about 89%, at least about 90%, at least about 91%, at least about 92%, at least about 93%, at least about 94%, at least about 95%, at least about 96%, at least about 97%, at least about 98% or at least about 99% relative to baseline.

[0075] In some embodiments, the treatment lowers the level of lactate dehydrogenase (LDH) in the subject to levels lower than about 1.5 times the upper limit of normal (ULN).

[0076] In some aspects, the subject previously treated with eculizumab did not have breakthrough hemolysis. In other aspects, the subject previously treated with eculizumab had breakthrough hemolysis.

[0077] In some embodiments, the treatment reduces the mean maximum C5 mRNA level by at least about 86% relative to baseline, e.g., at least about 87%, at least about 88%, at least about 89%, at least about 90%, at least about 91%, at least about 92%, at least about 93%, at least about 94%, at least about 95%, at least about 96%, at least about 97%, at least about 98% or at least about 99% relative to baseline.

[0078] In some aspects, the treatment lowers the minimum residual C5 level to about 8.0 micrograms/mL or below, e.g., about 7.5 micrograms/mL or below, about 7.0 micrograms/mL or below, about 6.5 micrograms/mL or below, about 6.0 micrograms/mL or below, about 5.5 micrograms/mL or below, about 5.0 micrograms/mL or below, about 4.5 micrograms/mL or below, about 4.0 micrograms/mL or below, about 3.5 micrograms/mL or below, about 3.0 micrograms/mL or below, about 2.5 micrograms/mL or below, about 2.0 micrograms/mL or below, about 1.5 micrograms/mL or below, about 1.0 micrograms/mL or below or about 0.5 micrograms/mL or below.

[0079] In some embodiments, the treatment lowers the classical complement pathway (CCP) activity by at least about 98% relative to baseline, e.g., at least about 99% relative to baseline.

[0080] In some aspects, the treatment lowers the alternative complement pathway (CAP) activity by at least about 98% relative to baseline, e.g., at least about 99% relative to baseline.

[0081] In certain embodiments, the treatment inhibits the mean maximum hemolysis, as measured by inhibition of sheep red blood cell hemolysis, by at least about 98% relative to baseline, e.g., at least about 99% relative to baseline.

[0082] In some embodiments, the level of lactate dehydrogenase (LDH) in the subject is reduced to about 215-225 IU/L.

[0083] In some aspects, the dsRNA agent is administered to the subject subcutaneously. In other aspects, the eculizumab is administered to the subject intravenously.

[0084] In some embodiments, the dsRNA agent further comprises a ligand. The ligand may be one or more GalNAc derivatives attached through a bivalent or trivalent branched linker. In a specific aspect, the ligand is

[chemical structure]

[0085] In further aspects, the ligand is attached to the 3′ end of the sense strand. In a specific embodiment, the RNAi agent is conjugated to the ligand as shown in the following schematic

[chemical structure]

[0086] In one aspect, the invention provides methods for treating, e.g., chronically treating, a subject having paroxysmal nocturnal hemoglobinuria (PNH). The methods include administering to an eculizumab naïve subject a 200 mg fixed dose of a double stranded ribonucleic acid (dsRNA) agent for inhibiting expression of complement component C5 once every week for thirteen weeks, followed by a 400 mg fixed dose of the dsRNA agent once every week wherein the dsRNA agent comprises a sense strand and an antisense strand, and wherein the sense strand comprises 5′-asasGfcAfaGfaUfAfUfuUfuuAfuAfaua-3′ (SEQ ID NO:2876) and the antisense strand comprises 5′-usAfsUfuAfuaAfaAfauaUfcUfuGfcuususudTdT-3′ (SEQ ID NO:2889), wherein a, g, c and u are 2′-O-methyl (2′-OMe) A, G, C, and U, respectively; Af, Gf, Cf and Uf are 2′-fluoro A, G, C and U, respectively; dT is a deoxy-thymine nucleotide; and s is a phosphorothioate linkage, thereby treating the subject.

### BRIEF DESCRIPTION OF THE DRAWINGS

[0087] FIG. 1 is a schematic of the three complement pathways: alternative, classical and lectin.

[0088] FIG. 2 is a graph showing the percentage of complement component C5 remaining in C57BL/6 mice following a single 10 mg/kg dose of the indicated iRNAs.

[0089] FIG. 3 is a graph showing the percentage of complement component C5 remaining in C57BL/6 mice following a single 10 mg/kg dose of the indicated iRNAs.

[0090] FIG. 4 is a graph showing the percentage of complement component C5 remaining in C57BL/6 mice 48 hours after a single 10 mg/kg dose of the indicated iRNAs.

[0091] FIG. 5A is a graph showing the percentage of hemolysis remaining at days 4 and 7 in rats after a single 2.5 mg/kg, 10 mg/kg, or 25 mg/kg subcutaneous dose of AD-58642.

[0092] FIG. 5B is a Western blot showing the amount of complement component C5 remaining at day 7 in rats after a single 2.5 mg/kg, 10 mg/kg, or 25 mg/kg subcutaneous dose of AD-58642.

[0093] FIGS. 6A and 6B are graphs showing the percentage of complement component C5 remaining in C57BL/6 mice 5 days after a single 1.25 mg/kg, 2.5 mg/kg, 5 mg/kg, 10 mg/kg or 25 mg/kg dose of AD-58642.

[0094] FIGS. 7A and 7B are graphs showing the percentage of hemolysis remaining at day 5 in C57BL/6 mice after a single 1.25 mg/kg, 2.5 mg/kg, 5 mg/kg, 10 mg/kg or 25 mg/kg dose of AD-58642.

[0095] FIG. 8 is a Western blot showing the amount of complement component C5 remaining at day 5 in C57BL/6 mice after a single 1.25 mg/kg, 2.5 mg/kg, 5 mg/kg, 10 mg/kg or 25 mg/kg dose of AD-58642.

[0096] FIG. 9 is a graph showing the amount of complement component C5 protein remaining at days 5 and 9 in mouse serum after a single 0.625 mg/kg, 1.25 mg/kg, 2.5 mg/kg, 5.0 mg/kg, or 10 mg/kg dose of AD-58641. The lower limit of quantitation (LLOQ) of the assay is shown as a dashed line.

[0097] FIG. 10 is a is a graph showing the amount of complement component C5 protein remaining at day 8 in mouse serum after a 0.625 mg/kg, 1.25 mg/kg, or 2.5 mg/kg dose of AD-58641 at days 0, 1, 2, and 3. The lower limit of quantitation (LLOQ) of the assay is shown as a dashed line.

[0098] FIGS. 11A and 11B depict the efficacy and cumulative effect of repeat administration of compound AD-58641 in rats. FIG. 11A is graph depicting the hemolytic activity remaining in the serum of rats on days 0, 4, 7, 11, 14, 18, 25, and 32 after repeat administration at 2.5 mg/kg/dose or 5.0 mg/kg/dose, q2w×3 (twice a week for 3 weeks).

[0099] FIG. 11B is a Western blot showing the amount of complement component C5 protein remaining in the serum of the animals.

[0100] FIG. 12 is a graph showing the amount of complement component C5 protein in cynomolgus macaque serum at various time points before, during and after two rounds of subcutaneous dosing at 2.5 mg/kg or 5 mg/kg of AD-58641 every third day for eight doses. C5 protein levels were normalized to the average of the three pre-dose samples.

[0101] FIG. 13 is a graph showing the percentage of hemolysis remaining in cynomolgus macaque serum at various time points before, during and after two rounds of subcutaneous dosing at 2.5 mg/kg or 5 mg/kg of AD-58641 every third day for eight doses. Percent hemolysis was calculated relative to maximal hemolysis and to background hemolysis in control samples.

[0102] FIG. 14 is a graph showing the percentage of complement component C5 protein remaining at day 5 in the serum of C57BL/6 mice following a single 1 mg/kg dose of the indicated iRNAs.

[0103] FIG. 15 is a graph showing the percentage of complement component C5 protein remaining at day 5 in the serum of C57BL/6 mice following a single 0.25 mg/kg, 0.5 mg/kg, 1.0 mg/kg, or 2.0 mg/kg dose of the indicated iRNAs.

[0104] FIG. 16 is a graph showing the percentage of complement component C5 protein remaining in the serum of C57BL/6 mice at days 6, 13, 20, 27, and 34 following a single 1 mg/kg dose of the indicated iRNAs.

[0105] FIG. 17 is a graph showing the percentage of hemolysis remaining in rat serum at various time points following administration of a 5 mg/kg dose of the indicated compounds at days 0, 4, and 7.

[0106] FIG. 18A shows the nucleotide sequence of Homo sapiens Complement Component 5 (C5) (SEQ ID NO:1); FIG. 18B shows the nucleotide sequence of Macaca mulatta Complement Component 5 (C5) (SEQ ID NO:2); FIG. 18C shows the nucleotide sequence of Mus musculus Complement Component 5 (C5) (SEQ ID NO:3); FIG. 18D shows the nucleotide sequence of Rattus norvegicus Complement Component 5 (C5) (SEQ ID NO:4); FIG. 18E shows the reverse complement of SEQ ID NO:1 (SEQ ID NO:5); FIG. 18F shows the reverse complement of SEQ ID NO:2 (SEQ ID NO:6); FIG. 18G shows the reverse complement of SEQ ID NO:3 (SEQ ID NO:7); and FIG. 18H shows the reverse complement of SEQ ID NO:4 (SEQ ID NO:8).

[0107] FIG. 19A is a graph showing the percentage of serum C5 levels in cynomolgus macaques treated with AD-62643 relative to pre-bleed levels. FIG. 19B is a graph showing the percentage of serum C5 levels in each individual cynomolgus macaque treated with AD-62643.

[0108] FIG. 20A is a graph showing the percentage of hemolysis in cynomolgus macaques treated with a QM regimen (5 mg/kg, qd×5, qw×8/10 mg/kg qm thereafter) of AD-62643 and FIG. 20B is a graph showing the percentage of hemolysis in cynomolgus macaques treated with a Q2W regimen (5 mg/kg, qw×8, q2w thereafter) of AD-62643. FIG. 20C is a graph showing the percentage of alternative complement pathway activity in cynomolgus macaques treated with AD-62643.

[0109] FIG. 21 is a graph showing serum levels of C5 protein in a mouse model of anti-collagen antibody-induced arthritis (CAIA) following treatment with AD-61679 and anti-05 antibody.

[0110] FIG. 22A is a bar graph showing join histology scores in CAIA mice following treatment with AD-61679 and anti-05 antibody. FIG. 22B is a bar graph showing levels of C3 deposition in CAIA mice following treatment with AD-61679 and anti-05 antibody.

[0111] FIG. 23A is a bar graph showing the percentage of hemolysis in a rat model of Passive Neymann Nephritis treated with anti-Fx1a or with anti-Fx1a and AD-61679. FIG. 23B is a bar graph showing the levels of urinary protein in a rat model of Passive Neymann Nephritis treated with anti-Fx1a or with anti-Fx1a and AD-61679.

[0112] FIG. 24 is a graph showing the mean C5 knockdown, relative to baseline, in healthy human subjects administered a single subcutaneous dose of 50 mg, 200 mg, 400 mg, 600 mg, or 900 mg of AD-62643.

[0113] FIG. 25 is a graph showing the mean knockdown of alternative complement pathway (CAP) activity, relative to baseline, in healthy human subjects administered a single subcutaneous dose of 50 mg, 200 mg, 400 mg, 600 mg, or 900 mg of AD-62643.

[0114] FIG. 26 is a graph showing the mean knockdown of classical complement pathway (CCP) activity, relative to baseline, in healthy human subjects administered a single subcutaneous dose of 50 mg, 200 mg, 400 mg, 600 mg, or 900 mg of AD-62643.

[0115] FIG. 27 is a graph showing the percentage of mean hemolysis reduction in healthy human subjects administered a single subcutaneous dose of 50 mg, 200 mg, 400 mg, 600 mg, or 900 mg of AD-62643.

[0116] FIG. 28A is a graph showing the correlation of the mean C5 knockdown in humans administered a single dose of AD-62643 versus non-human primates (NHP) administered a single dose of AD-62643.

[0117] FIG. 28B is a graph showing the percentage of mean C5 knockdown, relative to baseline, in healthy human subjects administered a single subcutaneous dose of AD-62643 and in non-human primates administered a single subcutaneous dose of AD-62643.

[0118] FIG. 29 is a graph showing the mean knockdown of classical complement pathway (CCP) activity, relative to baseline, in healthy human subjects administered a single subcutaneous dose of AD-62643.

[0119] FIG. 30A is a graph showing the percentage of mean hemolysis reduction in healthy human subjects administered a single subcutaneous dose of AD-62643.

[0120] FIG. 30B is a graph showing the mean hemolysis reduction in non-human primates administered a single subcutaneous dose of AD-62643.

[0121] FIG. 31 is a graph showing the mean C5 knockdown, relative to baseline, in healthy human subjects subcutaneously administered the indicated doses of AD-62643.

[0122] FIG. 32 is a graph showing the mean knockdown of alternative complement pathway (CAP) activity, relative to baseline, in healthy human subjects subcutaneously administered the indicated doses of AD-62643.

[0123] FIG. 33 is a graph showing the mean knockdown of classical complement pathway (CCP) activity, relative to baseline, in healthy human subjects subcutaneously administered the indicated doses of AD-62643.

[0124] FIG. 34 is a graph showing the percentage of mean hemolysis reduction in healthy human subjects subcutaneously administered the indicated doses of AD-62643.

[0125] FIGS. 35A and 35B depict an indirect graphical comparison of residual C5 levels in the serum of healthy human volunteers administered multiple doses of AD-62643 and the levels of free C5 in aHUS subjects administered eculizumab. FIG. 35A is a graph depicting the levels of free C5 in aHUS subjects administered eculizumab (ASCPT Annual Meeting, Atlanta, Ga.; Mar. 18-22, 2014; Abstract #387). FIG. 35B is a graph depicting the residual C5 levels in the serum of healthy human volunteers administered the indicated doses of AD-62643.

[0126] FIG. 36A is a graph showing the mean C5 knockdown, relative to baseline, in human eculizumab naïve subjects with PNH who were subcutaneously administered AD-62643.

[0127] FIG. 36B is a graph showing the mean C5 knockdown, relative to baseline, in human subjects with PNH receiving eculizumab who were subcutaneously administered AD-62643.

[0128] FIG. 37A is a graph showing the mean knockdown of classical complement pathway (CCP) activity, relative to baseline, in human eculizumab naïve subjects with PNH who were subcutaneously administered AD-62643.

[0129] FIG. 37B is a graph showing the mean knockdown of classical complement pathway (CCP) activity, relative to baseline, in human subjects with PNH receiving eculizumab who were also subcutaneously administered AD-62643.

[0130] FIG. 38A is a graph showing the percentage of mean hemolysis reduction in human eculizumab naïve subjects with PNH who were subcutaneously administered AD-62643.

[0131] FIG. 38B is a graph showing the percentage of mean hemolysis reduction in human subjects with PNH receiving eculizumab who were subcutaneously administered AD-62643.

[0132] FIG. 39 is a graph showing LDH levels in human eculizumab naïve subjects with PNH who were subcutaneously administered AD-62643.

[0133] FIG. 40 is a graph showing LDH level in a human subject with PNH who is an eculizumab inadequate responder.

[0134] FIG. 41 is a graph showing eculizumab plasma concentration before and after subcutaneous administration of AD-62643 to a subject with PNH receiving eculizumab.

[0135] FIG. 42 depicts the dosing schedule for the subjects in the extension of the Phase I/II Part C clinical trial of AD-62643 to investigate the effect of reduced eculizumab administration (dose and frequency) in the setting of ongoing AD-62643 pharmacology (i.e., in the absence of additional dosing of AD-62643) (referred to herein as the “Ecu sparing study”).

[0136] FIG. 43 is a graph showing the effect of eculizumab administration in the setting of ongoing AD-62643 phramacology on LDH levels in human eculizumab naïve subjects with PNH and human ecuulizumab background subjects with PNH.

[0137] FIG. 44A is a graph showing the effect of eculizumab administration in the setting of ongoing AD-62643 phramacology on percent classical complement pathway (CCP) activity in human eculizumab naïve subjects with PNH and human ecuulizumab background subjects with PNH.

[0138] FIG. 44B is a graph showing the effect of eculizumab administration in the setting of ongoing AD-62643 phramacology on percent sheep red blood cell (sRBC) hemolysis in human eculizumab naïve subjects with PNH and human ecuulizumab background subjects with PNH.

[0139] FIG. 45 is a graph showing the effect of eculizumab administration in the setting of ongoing AD-62643 phramacology on eculizumab plasma concentration before and after subcutaneous administration eculizumab in human eculizumab naïve subjects with PNH and human ecuulizumab background subjects with PNH.

### DETAILED DESCRIPTION OF THE INVENTION

[0140] The present invention provides iRNA agents which effect the RNA-induced silencing complex (RISC)-mediated cleavage of RNA transcripts of a complement component C5 gene.

[0141] The iRNAs of the invention may include an RNA strand (the antisense strand) having a region which is about 30 nucleotides or less in length, e.g., 15-30, 15-29, 15-28, 15-27, 15-26, 15-25, 15-24, 15-23, 15-22, 15-21, 15-20, 15-19, 15-18, 15-17, 18-30, 18-29, 18-28, 18-27, 18-26, 18-25, 18-24, 18-23, 18-22, 18-21, 18-20, 19-30, 19-29, 19-28, 19-27, 19-26, 19-25, 19-24, 19-23, 19-22, 19-21, 19-20, 20-30, 20-29, 20-28, 20-27, 20-26, 20-25, 20-24, 20-23, 20-22, 20-21, 21-30, 21-29, 21-28, 21-27, 21-26, 21-25, 21-24, 21-23, or 21-22 nucleotides in length, which region is substantially complementary to at least part of an mRNA transcript of a C5 gene.

[0142] In certain embodiments, the iRNAs of the invention include an RNA strand (the antisense strand) which can include longer lengths, for example up to 66 nucleotides, e.g., 36-66, 26-36, 25-36, 31-60, 22-43, 27-53 nucleotides in length with a region of at least 19 contiguous nucleotides that is substantially complementary to at least a part of an mRNA transcript of a complement component C5 gene. These iRNAs with the longer length antisense strands preferably include a second RNA strand (the sense strand) of 20-60 nucleotides in length wherein the sense and antisense strands form a duplex of 18-30 contiguous nucleotides.

[0143] The use of these iRNAs enables the targeted degradation of mRNAs of a C5 gene in mammals. Very low dosages of C5 iRNAs, in particular, can specifically and efficiently mediate RNA interference (RNAi), resulting in significant inhibition of expression of a C5 gene. The present inventors have demonstrated that iRNAs targeting C5 can mediate RNAi in vitro and in vivo, resulting in significant inhibition of expression of a C5 gene. Thus, methods and compositions including these iRNAs are useful for treating a subject who would benefit by a reduction in the levels and/or activity of a C5 protein, such as a subject having a complement component C5-associated disease, such as paroxysmal nocturnal hemoglobinuria (PNH).

[0144] The present invention also provides methods and combination therapies for treating a subject having a disorder that would benefit from inhibiting or reducing the expression of a C5 gene, e.g., a complement component C5-associated disease, such as paroxysmal nocturnal hemoglobinuria (PNH), atypical hemolytic uremic syndrome (aHUS), neuromyelitis optica (NMO), and myasthenia gravis, using iRNA compositions which effect the RNA-induced silencing complex (RISC)-mediated cleavage of RNA transcripts of a complement component C5 gene.

[0145] The present invention also provides methods for preventing at least one symptom, e.g., hemolysis, in a subject having a disorder that would benefit from inhibiting or reducing the expression of a C5 gene, e.g., a complement component C5-associated disease, such as paroxysmal nocturnal hemoglobinuria (PNH), atypical hemolytic uremic syndrome (aHUS), neuromyelitis optica (NMO), and myasthenia gravis. The present invention further provides iRNA compositions which effect the RNA-induced silencing complex (RISC)-mediated cleavage of RNA transcripts of a complement component C5 gene. The C5 gene may be within a cell, e.g., a cell within a subject, such as a human.

[0146] The combination therapies of the present invention include administering to a subject having a complement component C5-associated disease, an RNAi agent of the invention and an additional therapeutic, such as anti-complement component C5 antibody, or antigen-binding fragment thereof, e.g., eculizumab. The combination therapies of the invention reduce C5 levels in the subject (e.g., by about 30%, 35%, 40%, 45%, 50%, 55%, 60%, 65%, 70%, 75%, 80%, 85%, 90%, 95%, or about 99%) by targeting C5 mRNA with an iRNA agent of the invention and, accordingly, allow the therapeutically (or prophylactically) effective amount of eculizumab required to treat the subject to be reduced, thereby decreasing the costs of treatment and permitting easier and more convenient ways of administering eculizumab, such as subcutaneous administration.

[0147] The following detailed description discloses how to make and use compositions containing iRNAs to inhibit the expression of a C5 gene, as well as compositions, uses, and methods for treating subjects having diseases and disorders that would benefit from inhibition and/or reduction of the expression of this gene.

### I. Definitions

[0148] In order that the present invention may be more readily understood, certain terms are first defined. In addition, it should be noted that whenever a value or range of values of a parameter are recited, it is intended that values and ranges intermediate to the recited values are also intended to be part of this invention.

[0149] The articles “a” and “an” are used herein to refer to one or to more than one (i.e., to at least one) of the grammatical object of the article. By way of example, “an element” means one element or more than one element, e.g., a plurality of elements.

[0150] The term “including” is used herein to mean, and is used interchangeably with, the phrase “including but not limited to”.

[0151] The term “or” is used herein to mean, and is used interchangeably with, the term “and/or,” unless context clearly indicates otherwise.

[0152] As used herein, “complement component C5,” used interchangeably with the term “C5” refers to the well-known gene and polypeptide, also known in the art as CPAMD4, C3 and PZP-like alpha-2-macroglobulin domain-containing protein, anaphtlatoxin C5a analog, hemolytic complement (Hc), and complement C5. The sequence of a human C5 mRNA transcript can be found at, for example, GenBank Accession No. GI:38016946 (NM_001735.2; SEQ ID NO:1). The sequence of rhesus C5 mRNA can be found at, for example, GenBank Accession No. GI:297270262 (XM_001095750.2; SEQ ID NO:2). The sequence of mouse C5 mRNA can be found at, for example, GenBank Accession No. GI:291575171 (NM_010406.2; SEQ ID NO:3). The sequence of rat C5 mRNA can be found at, for example, GenBank Accession No. GI:392346248 (XM_345342.4; SEQ ID NO:4). Additional examples of C5 mRNA sequences are readily available using publicly available databases, e.g., GenBank.

[0153] The term“C5,” as used herein, also refers to naturally occurring DNA sequence variations of the C5 gene, such as a single nucleotide polymorphism in the C5 gene. Numerous SNPs within the C5 gene have been identified and may be found at, for example, NCBI dbSNP (see, e.g., ncbi.nlm.nih.gov/snp). Non-limiting examples of SNPs within the C5 gene may be found at, NCBI dbSNP Accession Nos. rs121909588 and rs121909587.

[0154] As used herein, “target sequence” refers to a contiguous portion of the nucleotide sequence of an mRNA molecule formed during the transcription of a C5 gene, including mRNA that is a product of RNA processing of a primary transcription product. In one embodiment, the target portion of the sequence will be at least long enough to serve as a substrate for iRNA-directed cleavage at or near that portion of the nucleotide sequence of an mRNA molecule formed during the transcription of a C5 gene.

[0155] The target sequence may be from about 9-36 nucleotides in length, e.g., about 15-30 nucleotides in length. For example, the target sequence can be from about 15-30 nucleotides, 15-29, 15-28, 15-27, 15-26, 15-25, 15-24, 15-23, 15-22, 15-21, 15-20, 15-19, 15-18, 15-17, 18-30, 18-29, 18-28, 18-27, 18-26, 18-25, 18-24, 18-23, 18-22, 18-21, 18-20, 19-30, 19-29, 19-28, 19-27, 19-26, 19-25, 19-24, 19-23, 19-22, 19-21, 19-20, 20-30, 20-29, 20-28, 20-27, 20-26, 20-25, 20-24, 20-23, 20-22, 20-21, 21-30, 21-29, 21-28, 21-27, 21-26, 21-25, 21-24, 21-23, or 21-22 nucleotides in length. Ranges and lengths intermediate to the above recited ranges and lengths are also contemplated to be part of the invention.

[0156] As used herein, the term “strand comprising a sequence” refers to an oligonucleotide comprising a chain of nucleotides that is described by the sequence referred to using the standard nucleotide nomenclature.

[0157] “G,” “C,” “A,” “T” and “U” each generally stand for a nucleotide that contains guanine, cytosine, adenine, thymidine and uracil as a base, respectively. However, it will be understood that the term “ribonucleotide” or “nucleotide” can also refer to a modified nucleotide, as further detailed below, or a surrogate replacement moiety (see, e.g., Table 2). The skilled person is well aware that guanine, cytosine, adenine, and uracil can be replaced by other moieties without substantially altering the base pairing properties of an oligonucleotide comprising a nucleotide bearing such replacement moiety. For example, without limitation, a nucleotide comprising inosine as its base can base pair with nucleotides containing adenine, cytosine, or uracil. Hence, nucleotides containing uracil, guanine, or adenine can be replaced in the nucleotide sequences of dsRNA featured in the invention by a nucleotide containing, for example, inosine. In another example, adenine and cytosine anywhere in the oligonucleotide can be replaced with guanine and uracil, respectively to form G-U Wobble base pairing with the target mRNA. Sequences containing such replacement moieties are suitable for the compositions and methods featured in the invention.

[0158] The terms “iRNA”, “RNAi agent,” “iRNA agent,”, “RNA interference agent” as used interchangeably herein, refer to an agent that contains RNA as that term is defined herein, and which mediates the targeted cleavage of an RNA transcript via an RNA-induced silencing complex (RISC) pathway. iRNA directs the sequence-specific degradation of mRNA through a process known as RNA interference (RNAi). The iRNA modulates, e.g., inhibits, the expression of C5 in a cell, e.g., a cell within a subject, such as a mammalian subject.

[0159] In one embodiment, an RNAi agent of the invention includes a single stranded RNA that interacts with a target RNA sequence, e.g., a C5 target mRNA sequence, to direct the cleavage of the target RNA. Without wishing to be bound by theory it is believed that long double stranded RNA introduced into cells is broken down into siRNA by a Type III endonuclease known as Dicer (Sharp et al. (2001) Genes Dev. 15:485). Dicer, a ribonuclease-III-like enzyme, processes the dsRNA into 19-23 base pair short interfering RNAs with characteristic two base 3′ overhangs (Bernstein, et al., (2001) Nature 409:363). The siRNAs are then incorporated into an RNA-induced silencing complex (RISC) where one or more helicases unwind the siRNA duplex, enabling the complementary antisense strand to guide target recognition (Nykanen, et al., (2001) Cell 107:309). Upon binding to the appropriate target mRNA, one or more endonucleases within the RISC cleave the target to induce silencing (Elbashir, et al., (2001) Genes Dev. 15:188). Thus, in one aspect the invention relates to a single stranded RNA (siRNA) generated within a cell and which promotes the formation of a RISC complex to effect silencing of the target gene, i.e., a C5 gene. Accordingly, the term “siRNA” is also used herein to refer to an RNAi as described above.

[0160] In another embodiment, the RNAi agent may be a single-stranded siRNA that is introduced into a cell or organism to inhibit a target mRNA. Single-stranded RNAi agents bind to the RISC endonuclease, Argonaute 2, which then cleaves the target mRNA. The single-stranded siRNAs are generally 15-30 nucleotides and are chemically modified. The design and testing of single-stranded siRNAs are described in U.S. Pat. No. 8,101,348 and in Lima et al., (2012) Cell 150: 883-894, the entire contents of each of which are hereby incorporated herein by reference. Any of the antisense nucleotide sequences described herein may be used as a single-stranded siRNA as described herein or as chemically modified by the methods described in Lima et al., (2012) Cell 150:883-894.

[0161] In another embodiment, an “iRNA” for use in the compositions, uses, and methods of the invention is a double stranded RNA and is referred to herein as a “double stranded RNAi agent,” “double stranded RNA (dsRNA) molecule,” “dsRNA agent,” or “dsRNA”. The term “dsRNA”, refers to a complex of ribonucleic acid molecules, having a duplex structure comprising two anti-parallel and substantially complementary nucleic acid strands, referred to as having “sense” and “antisense” orientations with respect to a target RNA, i.e., a C5 gene. In some embodiments of the invention, a double stranded RNA (dsRNA) triggers the degradation of a target RNA, e.g., an mRNA, through a post-transcriptional gene-silencing mechanism referred to herein as RNA interference or RNAi.

[0162] In general, the majority of nucleotides of each strand of a dsRNA molecule are ribonucleotides, but as described in detail herein, each or both strands can also include one or more non-ribonucleotides, e.g., a deoxyribonucleotide and/or a modified nucleotide. In addition, as used in this specification, an “RNAi agent” may include ribonucleotides with chemical modifications; an RNAi agent may include substantial modifications at multiple nucleotides. As used herein, the term “modified nucleotide” refers to a nucleotide having, independently, a modified sugar moiety, a modified internucleotide linkage, and/or a modified nucleobase. Thus, the term modified nucleotide encompasses substitutions, additions or removal of, e.g., a functional group or atom, to internucleoside linkages, sugar moieties, or nucleobases. The modifications suitable for use in the agents of the invention include all types of modifications disclosed herein or known in the art. Any such modifications, as used in a siRNA type molecule, are encompassed by “RNAi agent” for the purposes of this specification and claims. The duplex region may be of any length that permits specific degradation of a desired target RNA through a RISC pathway, and may range from about 9 to 36 base pairs in length, e.g., about 15-30 base pairs in length, for example, about 9, 10, 11, 12, 13, 14, 15, 16, 17, 18, 19, 20, 21, 22, 23, 24, 25, 26, 27, 28, 29, 30, 31, 32, 33, 34, 35, or 36 base pairs in length, such as about 15-30, 15-29, 15-28, 15-27, 15-26, 15-25, 15-24, 15-23, 15-22, 15-21, 15-20, 15-19, 15-18, 15-17, 18-30, 18-29, 18-28, 18-27, 18-26, 18-25, 18-24, 18-23, 18-22, 18-21, 18-20, 19-30, 19-29, 19-28, 19-27, 19-26, 19-25, 19-24, 19-23, 19-22, 19-21, 19-20, 20-30, 20-29, 20-28, 20-27, 20-26, 20-25, 20-24, 20-23, 20-22, 20-21, 21-30, 21-29, 21-28, 21-27, 21-26, 21-25, 21-24, 21-23, or 21-22 base pairs in length. Ranges and lengths intermediate to the above recited ranges and lengths are also contemplated to be part of the invention.

[0163] The two strands forming the duplex structure may be different portions of one larger RNA molecule, or they may be separate RNA molecules. Where the two strands are part of one larger molecule, and therefore are connected by an uninterrupted chain of nucleotides between the 3′-end of one strand and the 5′-end of the respective other strand forming the duplex structure, the connecting RNA chain is referred to as a “hairpin loop.” A hairpin loop can comprise at least one unpaired nucleotide. In some embodiments, the hairpin loop can comprise at least 2, at least 3, at least 4, at least 5, at least 6, at least 7, at least 8, at least 9, at least 10, at least 20, at least 23 or more unpaired nucleotides.

[0164] Where the two substantially complementary strands of a dsRNA are comprised by separate RNA molecules, those molecules need not, but can be covalently connected. Where the two strands are connected covalently by means other than an uninterrupted chain of nucleotides between the 3′-end of one strand and the 5′-end of the respective other strand forming the duplex structure, the connecting structure is referred to as a “linker.” The RNA strands may have the same or a different number of nucleotides. The maximum number of base pairs is the number of nucleotides in the shortest strand of the dsRNA minus any overhangs that are present in the duplex. In addition to the duplex structure, an RNAi may comprise one or more nucleotide overhangs.

[0165] In one embodiment, an RNAi agent of the invention is a dsRNA of 24-30 nucleotides that interacts with a target RNA sequence, e.g., a C5 target mRNA sequence, to direct the cleavage of the target RNA. Without wishing to be bound by theory, long double stranded RNA introduced into cells is broken down into siRNA by a Type III endonuclease known as Dicer (Sharp et al. (2001) Genes Dev. 15:485). Dicer, a ribonuclease-III-like enzyme, processes the dsRNA into 19-23 base pair short interfering RNAs with characteristic two base 3′ overhangs (Bernstein, et al., (2001) Nature 409:363). The siRNAs are then incorporated into an RNA-induced silencing complex (RISC) where one or more helicases unwind the siRNA duplex, enabling the complementary antisense strand to guide target recognition (Nykanen, et al., (2001) Cell 107:309). Upon binding to the appropriate target mRNA, one or more endonucleases within the RISC cleave the target to induce silencing (Elbashir, et al., (2001) Genes Dev. 15:188).

[0166] As used herein, the term “nucleotide overhang” refers to at least one unpaired nucleotide that protrudes from the duplex structure of an iRNA, e.g., a dsRNA. For example, when a 3′-end of one strand of a dsRNA extends beyond the 5′-end of the other strand, or vice versa, there is a nucleotide overhang. A dsRNA can comprise an overhang of at least one nucleotide; alternatively the overhang can comprise at least two nucleotides, at least three nucleotides, at least four nucleotides, at least five nucleotides or more. A nucleotide overhang can comprise or consist of a nucleotide/nucleoside analog, including a deoxynucleotide/nucleoside. The overhang(s) can be on the sense strand, the antisense strand or any combination thereof. Furthermore, the nucleotide(s) of an overhang can be present on the 5′-end, 3′-end or both ends of either an antisense or sense strand of a dsRNA.

[0167] In one embodiment, the antisense strand of a dsRNA has a 1-10 nucleotide, e.g., a 1, 2, 3, 4, 5, 6, 7, 8, 9, or 10 nucleotide, overhang at the 3′-end and/or the 5′-end. In one embodiment, the sense strand of a dsRNA has a 1-10 nucleotide, e.g., a 1, 2, 3, 4, 5, 6, 7, 8, 9, or 10 nucleotide, overhang at the 3′-end and/or the 5′-end. In another embodiment, one or more of the nucleotides in the overhang is replaced with a nucleoside thiophosphate.

[0168] In certain embodiments, the overhang on the sense strand or the antisense strand, or both, can include extended lengths longer than 10 nucleotides, e.g., 1-30 nucleotides, 2-30 nucleotides, 10-30 nucleotides, or 10-15 nucleotides in length. In certain embodiments, an extended overhang is on the sense strand of the duplex. In certain embodiments, an extended overhang is present on the 3′end of the sense strand of the duplex. In certain embodiments, an extended overhang is present on the 5′end of the sense strand of the duplex. In certain embodiments, an extended overhang is on the antisense strand of the duplex. In certain embodiments, an extended overhang is present on the 3′end of the antisense strand of the duplex. In certain embodiments, an extended overhang is present on the 5′end of the antisense strand of the duplex. In certain embodiments, one or more of the nucleotides in the overhang is replaced with a nucleoside thiophosphate. In certain embodiments, the overhang includes a self-complementary portion such that the overhang is capable of forming a hairpin structure that is stable under physiological conditions.

[0169] “Blunt” or “blunt end” means that there are no unpaired nucleotides at that end of the double stranded RNAi agent, i.e., no nucleotide overhang. A “blunt ended” RNAi agent is a dsRNA that is double stranded over its entire length, i.e., no nucleotide overhang at either end of the molecule. The RNAi agents of the invention include RNAi agents with nucleotide overhangs at one end (i.e., agents with one overhang and one blunt end) or with nucleotide overhangs at both ends.

[0170] The term “antisense strand” or “guide strand” refers to the strand of an iRNA, e.g., a dsRNA, which includes a region that is substantially complementary to a target sequence, e.g., a C5 mRNA. As used herein, the term “region of complementarity” refers to the region on the antisense strand that is substantially complementary to a sequence, for example a target sequence, e.g., a C5 nucleotide sequence, as defined herein. Where the region of complementarity is not fully complementary to the target sequence, the mismatches can be in the internal or terminal regions of the molecule. Generally, the most tolerated mismatches are in the terminal regions, e.g., within 5, 4, 3, or 2 nucleotides of the 5′- and/or 3′-terminus of the iRNA.

[0171] The term “sense strand,” or “passenger strand” as used herein, refers to the strand of an iRNA that includes a region that is substantially complementary to a region of the antisense strand as that term is defined herein.

[0172] As used herein, the term “cleavage region” refers to a region that is located immediately adjacent to the cleavage site. The cleavage site is the site on the target at which cleavage occurs. In some embodiments, the cleavage region comprises three bases on either end of, and immediately adjacent to, the cleavage site. In some embodiments, the cleavage region comprises two bases on either end of, and immediately adjacent to, the cleavage site. In some embodiments, the cleavage site specifically occurs at the site bound by nucleotides 10 and 11 of the antisense strand, and the cleavage region comprises nucleotides 11, 12 and 13.

[0173] As used herein, and unless otherwise indicated, the term “complementary,” when used to describe a first nucleotide sequence in relation to a second nucleotide sequence, refers to the ability of an oligonucleotide or polynucleotide comprising the first nucleotide sequence to hybridize and form a duplex structure under certain conditions with an oligonucleotide or polynucleotide comprising the second nucleotide sequence, as will be understood by the skilled person. Such conditions can, for example, be stringent conditions, where stringent conditions can include: 400 mM NaCl, 40 mM PIPES pH 6.4, 1 mM EDTA, 50° C. or 70° C. for 12-16 hours followed by washing (see, e.g., “Molecular Cloning: A Laboratory Manual, Sambrook, et al. (1989) Cold Spring Harbor Laboratory Press). Other conditions, such as physiologically relevant conditions as can be encountered inside an organism, can apply. The skilled person will be able to determine the set of conditions most appropriate for a test of complementarity of two sequences in accordance with the ultimate application of the hybridized nucleotides.

[0174] Complementary sequences within an iRNA, e.g., within a dsRNA as described herein, include base-pairing of the oligonucleotide or polynucleotide comprising a first nucleotide sequence to an oligonucleotide or polynucleotide comprising a second nucleotide sequence over the entire length of one or both nucleotide sequences. Such sequences can be referred to as “fully complementary” with respect to each other herein. However, where a first sequence is referred to as “substantially complementary” with respect to a second sequence herein, the two sequences can be fully complementary, or they can form one or more, but generally not more than 5, 4, 3 or 2 mismatched base pairs upon hybridization for a duplex up to 30 base pairs, while retaining the ability to hybridize under the conditions most relevant to their ultimate application, e.g., inhibition of gene expression via a RISC pathway. However, where two oligonucleotides are designed to form, upon hybridization, one or more single stranded overhangs, such overhangs shall not be regarded as mismatches with regard to the determination of complementarity. For example, a dsRNA comprising one oligonucleotide 21 nucleotides in length and another oligonucleotide 23 nucleotides in length, wherein the longer oligonucleotide comprises a sequence of 21 nucleotides that is fully complementary to the shorter oligonucleotide, can yet be referred to as “fully complementary” for the purposes described herein.

[0175] “Complementary” sequences, as used herein, can also include, or be formed entirely from, non-Watson-Crick base pairs and/or base pairs formed from non-natural and modified nucleotides, in so far as the above requirements with respect to their ability to hybridize are fulfilled. Such non-Watson-Crick base pairs include, but are not limited to, G:U Wobble or Hoogstein base pairing.

[0176] The terms “complementary,” “fully complementary” and “substantially complementary” herein can be used with respect to the base matching between the sense strand and the antisense strand of a dsRNA, or between the antisense strand of an iRNA agent and a target sequence, as will be understood from the context of their use.

[0177] As used herein, a polynucleotide that is “substantially complementary to at least part of” a messenger RNA (mRNA) refers to a polynucleotide that is substantially complementary to a contiguous portion of the mRNA of interest (e.g., an mRNA encoding C5). For example, a polynucleotide is complementary to at least a part of a C5 mRNA if the sequence is substantially complementary to a non-interrupted portion of an mRNA encoding C5.

[0178] Accordingly, in some embodiments, the sense strand polynucleotides and the antisense polynucleotides disclosed herein are fully complementary to a complement component C5 gene sequence.

[0179] In one embodiment, the antisense polynucleotides disclosed herein are fully complementary to the target complement component C5 sequence. In other embodiments, the antisense polynucleotides disclosed herein are substantially complementary to the target complement component C5 sequence and comprise a contiguous nucleotide sequence which is at least about 80% complementary over its entire length to the equivalent region of the nucleotide sequence of SEQ ID NO:1, or a fragment of SEQ ID NO:1, such as about 85%, about 86%, about 87%, about 88%, about 89%, about 90%, about % 91%, about 92%, about 93%, about 94%, about 95%, about 96%, about 97%, about 98%, or about 99% complementary.

[0180] In other embodiments, the antisense polynucleotides disclosed herein are substantially complementary to the target complement component C5 sequence and comprise a contiguous nucleotide sequence which is at least about 80% complementary over its entire length to any one of the sense strand nucleotide sequences in any one of Tables_3, 4, 5, 6, 18, 19, 20, 21, and 23, or a fragment of any one of the antisense strand nucleotide sequences in any one of Tables 3, 4, 5, 6, 18, 19, 20, 21, and 23, such as about 85%, about 86%, about 87%, about 88%, about 89%, about 90%, about % 91%, about 92%, about 93%, about 94%, about 95%, about 96%, about 97%, about 98%, or about 99% complementary.

[0181] In one embodiment, an RNAi agent of the invention includes a sense strand that is substantially complementary to an antisense polynucleotide which, in turn, is complementary to a target complement component C5 sequence and comprises a contiguous nucleotide sequence which is at least about 80% complementary over its entire length to any one of the antisense strand nucleotide sequences in any one of Tables 3, 4, 5, 6, 18, 19, 20, 21, and 23, or a fragment of any one of the antisense strand nucleotide sequences in any one of Tables 3, 4, 5, 6, 18, 19, 20, 21, and 23, such as about 85%, about 86%, about 87%, about 88%, about 89%, about 90%, about % 91%, about 92%, about 93%, about 94%, about 95%, about 96%, about 97%, about 98%, or about 99% complementary.

[0182] In general, the majority of nucleotides of each strand are ribonucleotides, but as described in detail herein, each or both strands can also include one or more non-ribonucleotides, e.g., a deoxyribonucleotide and/or a modified nucleotide. In addition, an “iRNA” may include ribonucleotides with chemical modifications. Such modifications may include all types of modifications disclosed herein or known in the art. Any such modifications, as used in an iRNA molecule, are encompassed by “iRNA” for the purposes of this specification and claims.

[0183] In one aspect of the invention, an agent for use in the methods and compositions of the invention is a single-stranded antisense RNA molecule that inhibits a target mRNA via an antisense inhibition mechanism. The single-stranded antisense RNA molecule is complementary to a sequence within the target mRNA. The single-stranded antisense oligonucleotides can inhibit translation in a stoichiometric manner by base pairing to the mRNA and physically obstructing the translation machinery, see Dias, N. et al., (2002) Mol Cancer Ther 1:347-355. The single-stranded antisense RNA molecule may be about 15 to about 30 nucleotides in length and have a sequence that is complementary to a target sequence. For example, the single-stranded antisense RNA molecule may comprise a sequence that is at least about 15, 16, 17, 18, 19, 20, or more contiguous nucleotides from any one of the antisense sequences described herein.

[0184] The term “lipid nanoparticle” or “LNP” is a vesicle comprising a lipid layer encapsulating a pharmaceutically active molecule, such as a nucleic acid molecule, e.g., an iRNA or a plasmid from which an iRNA is transcribed. LNPs are described in, for example, U.S. Pat. Nos. 6,858,225, 6,815,432, 8,158,601, and 8,058,069, the entire contents of which are hereby incorporated herein by reference.

[0185] As used herein, a “subject” is an animal, such as a mammal, including a primate (such as a human, a non-human primate, e.g., a monkey, and a chimpanzee), a non-primate (such as a cow, a pig, a camel, a llama, a horse, a goat, a rabbit, a sheep, a hamster, a guinea pig, a cat, a dog, a rat, a mouse, a horse, and a whale), or a bird (e.g., a duck or a goose). In an embodiment, the subject is a human, such as a human being treated or assessed for a disease, disorder or condition that would benefit from reduction in C5 expression; a human at risk for a disease, disorder or condition that would benefit from reduction in C5 expression; a human having a disease, disorder or condition that would benefit from reduction in C5 expression; and/or human being treated for a disease, disorder or condition that would benefit from reduction in C5 expression as described herein.

[0186] As used herein, the terms “treating” or “treatment” refer to a beneficial or desired result including, but not limited to, alleviation or amelioration of one or more symptoms associated with unwanted complement pathway activation (e.g., hemolysis and/or chronic inflammation); diminishing the extent of unwanted complement pathway activation; stabilization (i.e., not worsening) of the state of chronic inflammation and/or hemolysis; amelioration or palliation of unwanted complement pathway activation (e.g., chronic inflammation and/or hemolysis) whether detectable or undetectable. “Treatment” can also mean prolonging survival as compared to expected survival in the absence of treatment.

[0187] The term “lower” in the context of the level of a complement component C5 in a subject or a disease marker or symptom refers to a statistically significant decrease in such level. The decrease can be, for example, at least 10%, at least 15%, at least 20%, at least 25%, at least 30%, at least 35%, at least 40%, at least 45%, at least 50%, at least 55%, at least 60%, at least 65%, at least 70%, at least 75%, at least 80%, at least 85%, at least 90%, at least 95%, or more and is preferably down to a level accepted as within the range of normal for an individual without such disorder.

[0188] As used herein, “prevention” or “preventing,” when used in reference to a disease, disorder or condition thereof, that would benefit from a reduction in expression of a C5 gene, refers to a reduction in the likelihood that a subject will develop a symptom associated with such a disease, disorder, or condition, or a reduction in the frequency and/or duration of a symptom associated with such a disease, disorder, or condition, e.g., a symptom of unwanted complement activation, such as a chronic inflammation, hemolysis and/or thrombosis. The likelihood of developing a thrombosis is reduced, for example, when an individual having one or more risk factors for a thrombosis either fails to develop a thrombosis or develops a thrombosis with less severity relative to a population having the same risk factors and not receiving treatment as described herein. The failure to develop a disease, disorder or condition, or the reduction in the development of a symptom associated with such a disease, disorder or condition (e.g., by at least about 10% on a clinically accepted scale for that disease or disorder), or the exhibition of delayed symptoms delayed (e.g., by days, weeks, months or years) is considered effective prevention.

[0189] As used herein, the term “complement component C5-associated disease” is a disease or disorder that is caused by, or associated with complement activation. Such diseases are typically associated with inflammation and/or immune system activation, e.g., membrane attack complex-mediated lysis, anaphylaxis, and/or hemolysis. Non-limiting examples of complement component C5-associated diseases include paroxysmal nocturnal hemoglobinuria (PNH), atypical hemolytic uremic syndrome (aHUS), asthma, rheumatoid arthritis (RA); antiphospholipid antibody syndrome; lupus nephritis; ischemia-reperfusion injury; typical or infectious hemolytic uremic syndrome (tHUS); dense deposit disease (DDD); neuromyelitis optica (NMO); multifocal motor neuropathy (MMN); multiple sclerosis (MS); macular degeneration (e.g., age-related macular degeneration (AMD)); hemolysis, elevated liver enzymes, and low platelets (HELLP) syndrome; thrombotic thrombocytopenic purpura (TTP); spontaneous fetal loss; Pauci-immune vasculitis; epidermolysis bullosa; recurrent fetal loss; pre-eclampsia, traumatic brain injury, myasthenia gravis, cold agglutinin disease, dermatomyositis bullous pemphigoid, Shiga toxin E. coli-related hemolytic uremic syndrome, C3 nephropathy, anti-neutrophil cytoplasmic antibody-associated vasculitis (e.g., granulomatosis with polyangiitis (previously known as Wegener granulomatosis), Churg-Strauss syndrome, and microscopic polyangiitis), humoral and vascular transplant rejection, graft dysfunction, myocardial infarction (e.g., tissue damage and ischemia in myocardial infarction), an allogenic transplant, sepsis (e.g., poor outcome in sepsis), Coronary artery disease, dermatomyositis, Graves' disease, atherosclerosis, Alzheimer's disease, systemic inflammatory response sepsis, septic shock, spinal cord injury, glomerulonephritis, Hashimoto's thyroiditis, type I diabetes, psoriasis, pemphigus, autoimmune hemolytic anemia (AIHA), ITP, Goodpasture syndrome, Degos disease, antiphospholipid syndrome (APS), catastrophic APS (CAPS), a cardiovascular disorder, myocarditis, a cerebrovascular disorder, a peripheral (e.g., musculoskeletal) vascular disorder, a renovascular disorder, a mesenteric/enteric vascular disorder, vasculitis, Henoch-Schönlein purpura nephritis, systemic lupus erythematosus-associated vasculitis, vasculitis associated with rheumatoid arthritis, immune complex vasculitis, Takayasu's disease, dilated cardiomyopathy, diabetic angiopathy, Kawasaki's disease (arteritis), venous gas embolus (VGE), and restenosis following stent placement, rotational atherectomy, membraneous nephropathy, Guillain-Barre syndrome, and percutaneous transluminal coronary angioplasty (PTCA) (see, e.g., Holers (2008) Immunological Reviews 223:300-316; Holers and Thurman (2004) Molecular Immunology 41:147-152; U.S. Patent Publication No. 20070172483).

[0190] In one embodiment, a complement component C5-associated disease is paroxysmal nocturnal hemoglobinuria (PNH). The PNH may be classical PNH or PNH in the setting of another bone marrow failure syndrome and/or myelodysplastic syndromes (MDS), e.g., cytopenias. In another embodiment, a complement component C5-associated disease is atypical hemolytic uremic syndrome (aHUS). In another embodiment, a complement component C5-associated disease is neuromyelitis optica (NMO). In yet another embodiment, a complement component C5-associated disease is myasthenia gravis.

### II. iRNAs of the Invention

[0191] The present invention provides iRNAs which inhibit the expression of a complement component C5 gene. In one embodiment, the iRNA agent includes double stranded ribonucleic acid (dsRNA) molecules for inhibiting the expression of a C5 gene in a cell, such as a cell within a subject, e.g., a mammal, such as a human having a complement component C5-associated disease, e.g., PNH. The dsRNA includes an antisense strand having a region of complementarity which is complementary to at least a part of an mRNA formed in the expression of a C5 gene. The region of complementarity is about 30 nucleotides or less in length (e.g., about 30, 29, 28, 27, 26, 25, 24, 23, 22, 21, 20, 19, or 18 nucleotides or less in length). Upon contact with a cell expressing the C5 gene, the iRNA inhibits the expression of the C5 gene (e.g., a human, a primate, a non-primate, or a bird C5 gene) by at least about 10% as assayed by, for example, a PCR or branched DNA (bDNA)-based method, or by a protein-based method, such as by immunofluorescence analysis, using, for example, Western Blotting or flowcytometric techniques.

[0192] A dsRNA includes two RNA strands that are complementary and hybridize to form a duplex structure under conditions in which the dsRNA will be used. One strand of a dsRNA (the antisense strand) includes a region of complementarity that is substantially complementary, and generally fully complementary, to a target sequence. The target sequence can be derived from the sequence of an mRNA formed during the expression of a C5 gene. The other strand (the sense strand) includes a region that is complementary to the antisense strand, such that the two strands hybridize and form a duplex structure when combined under suitable conditions. As described elsewhere herein and as known in the art, the complementary sequences of a dsRNA can also be contained as self-complementary regions of a single nucleic acid molecule, as opposed to being on separate oligonucleotides.

[0193] Generally, the duplex structure is about 15 to 30 base pairs in length, e.g., about 15-29, 15-28, 15-27, 15-26, 15-25, 15-24, 15-23, 15-22, 15-21, 15-20, 15-19, 15-18, 15-17, 18-30, 18-29, 18-28, 18-27, 18-26, 18-25, 18-24, 18-23, 18-22, 18-21, 18-20, 19-30, 19-29, 19-28, 19-27, 19-26, 19-25, 19-24, 19-23, 19-22, 19-21, 19-20, 20-30, 20-29, 20-28, 20-27, 20-26, 20-25, 20-24, 20-23, 20-22, 20-21, 21-30, 21-29, 21-28, 21-27, 21-26, 21-25, 21-24, 21-23, or 21-22 base pairs in length. Ranges and lengths intermediate to the above recited ranges and lengths are also contemplated to be part of the invention.

[0194] Similarly, the region of complementarity to the target sequence is about 15 to 30 nucleotides in length, e.g., about 15-29, 15-28, 15-27, 15-26, 15-25, 15-24, 15-23, 15-22, 15-21, 15-20, 15-19, 15-18, 15-17, 18-30, 18-29, 18-28, 18-27, 18-26, 18-25, 18-24, 18-23, 18-22, 18-21, 18-20, 19-30, 19-29, 19-28, 19-27, 19-26, 19-25, 19-24, 19-23, 19-22, 19-21, 19-20, 20-30, 20-29, 20-28, 20-27, 20-26, 20-25, 20-24, 20-23, 20-22, 20-21, 21-30, 21-29, 21-28, 21-27, 21-26, 21-25, 21-24, 21-23, or 21-22 nucleotides in length. Ranges and lengths intermediate to the above recited ranges and lengths are also contemplated to be part of the invention.

[0195] In some embodiments, the dsRNA is about 15 to about 20 nucleotides in length, or about 25 to about 30 nucleotides in length. In general, the dsRNA is long enough to serve as a substrate for the Dicer enzyme. For example, it is well-known in the art that dsRNAs longer than about 21-23 nucleotides in length may serve as substrates for Dicer. As the ordinarily skilled person will also recognize, the region of an RNA targeted for cleavage will most often be part of a larger RNA molecule, often an mRNA molecule. Where relevant, a “part” of an mRNA target is a contiguous sequence of an mRNA target of sufficient length to allow it to be a substrate for RNAi-directed cleavage (i.e., cleavage through a RISC pathway).

[0196] One of skill in the art will also recognize that the duplex region is a primary functional portion of a dsRNA, e.g., a duplex region of about 9 to 36 base pairs, e.g., about 10-36, 11-36, 12-36, 13-36, 14-36, 15-36, 9-35, 10-35, 11-35, 12-35, 13-35, 14-35, 15-35, 9-34, 10-34, 11-34, 12-34, 13-34, 14-34, 15-34, 9-33, 10-33, 11-33, 12-33, 13-33, 14-33, 15-33, 9-32, 10-32, 11-32, 12-32, 13-32, 14-32, 15-32, 9-31, 10-31, 11-31, 12-31, 13-32, 14-31, 15-31, 15-30, 15-29, 15-28, 15-27, 15-26, 15-25, 15-24, 15-23, 15-22, 15-21, 15-20, 15-19, 15-18, 15-17, 18-30, 18-29, 18-28, 18-27, 18-26, 18-25, 18-24, 18-23, 18-22, 18-21, 18-20, 19-30, 19-29, 19-28, 19-27, 19-26, 19-25, 19-24, 19-23, 19-22, 19-21, 19-20, 20-30, 20-29, 20-28, 20-27, 20-26, 20-25, 20-24, 20-23, 20-22, 20-21, 21-30, 21-29, 21-28, 21-27, 21-26, 21-25, 21-24, 21-23, or 21-22 base pairs. Thus, in one embodiment, to the extent that it becomes processed to a functional duplex, of e.g., 15-30 base pairs, that targets a desired RNA for cleavage, an RNA molecule or complex of RNA molecules having a duplex region greater than 30 base pairs is a dsRNA. Thus, an ordinarily skilled artisan will recognize that in one embodiment, a miRNA is a dsRNA. In another embodiment, a dsRNA is not a naturally occurring miRNA. In another embodiment, an iRNA agent useful to target C5 expression is not generated in the target cell by cleavage of a larger dsRNA.

[0197] A dsRNA as described herein can further include one or more single-stranded nucleotide overhangs e.g., 1, 2, 3, or 4 nucleotides. dsRNAs having at least one nucleotide overhang can have unexpectedly superior inhibitory properties relative to their blunt-ended counterparts. A nucleotide overhang can comprise or consist of a nucleotide/nucleoside analog, including a deoxynucleotide/nucleoside. The overhang(s) can be on the sense strand, the antisense strand or any combination thereof. Furthermore, the nucleotide(s) of an overhang can be present on the 5′-end, 3′-end or both ends of either an antisense or sense strand of a dsRNA.

[0198] A dsRNA can be synthesized by standard methods known in the art as further discussed below, e.g., by use of an automated DNA synthesizer, such as are commercially available from, for example, Biosearch, Applied Biosystems, Inc.

[0199] iRNA compounds of the invention may be prepared using a two-step procedure. First, the individual strands of the double stranded RNA molecule are prepared separately. Then, the component strands are annealed. The individual strands of the siRNA compound can be prepared using solution-phase or solid-phase organic synthesis or both. Organic synthesis offers the advantage that the oligonucleotide strands comprising unnatural or modified nucleotides can be easily prepared. Single-stranded oligonucleotides of the invention can be prepared using solution-phase or solid-phase organic synthesis or both.

[0200] In one aspect, a dsRNA of the invention includes at least two nucleotide sequences, a sense sequence and an anti-sense sequence. The sense strand is selected from the group of sequences provided in any one of Tables 3, 4, 5, 6, 18, 19, 20, 21, and 23, and the corresponding antisense strand of the sense strand is selected from the group of sequences of any one of Tables 3, 4, 5, 6, 18, 19, 20, 21, and 23. In this aspect, one of the two sequences is complementary to the other of the two sequences, with one of the sequences being substantially complementary to a sequence of an mRNA generated in the expression of a C5 gene. As such, in this aspect, a dsRNA will include two oligonucleotides, where one oligonucleotide is described as the sense strand in any one of Tables 3, 4, 5, 6, 18, 19, 20, 21, and 23, and the second oligonucleotide is described as the corresponding antisense strand of the sense strand in any one of Tables 3, 4, 5, 6, 18, 19, 20, 21, and 23. In one embodiment, the substantially complementary sequences of the dsRNA are contained on separate oligonucleotides. In another embodiment, the substantially complementary sequences of the dsRNA are contained on a single oligonucleotide.

[0201] It will be understood that, although some of the sequences in Tables 3, 4, 5, 6, 18, 19, 20, 21, and 23 are described as modified and/or conjugated sequences, the RNA of the iRNA of the invention e.g., a dsRNA of the invention, may comprise any one of the sequences set forth in Tables 3, 4, 5, 6, 18, 19, 20, 21, and 23 that is un-modified, un-conjugated, and/or modified and/or conjugated differently than described therein.

[0202] The skilled person is well aware that dsRNAs having a duplex structure of between about 20 and 23 base pairs, e.g., 21, base pairs have been hailed as particularly effective in inducing RNA interference (Elbashir et al., EMBO 2001, 20:6877-6888). However, others have found that shorter or longer RNA duplex structures can also be effective (Chu and Rana (2007) RNA 14:1714-1719; Kim et al. (2005) Nat Biotech 23:222-226). In the embodiments described above, by virtue of the nature of the oligonucleotide sequences provided in any one of Tables 3, 4, 5, 6, 18, 19, 20, 21, and 23, dsRNAs described herein can include at least one strand of a length of minimally 21 nucleotides. It can be reasonably expected that shorter duplexes having one of the sequences of any one of Tables 3, 4, 5, 6, 18, 19, 20, 21, and 23 minus only a few nucleotides on one or both ends can be similarly effective as compared to the dsRNAs described above. Hence, dsRNAs having a sequence of at least 15, 16, 17, 18, 19, 20, or more contiguous nucleotides derived from one of the sequences of any one of Tables 3, 4, 5, 6, 18, 19, 20, 21, and 23, and differing in their ability to inhibit the expression of a C5 gene by not more than about 5, 10, 15, 20, 25, or 30% inhibition from a dsRNA comprising the full sequence, are contemplated to be within the scope of the present invention.

[0203] In addition, the RNAs provided in any one of Tables 3, 4, 5, 6, 18, 19, 20, 21, and 23 identify a site(s) in a C5 transcript that is susceptible to RISC-mediated cleavage. As such, the present invention further features iRNAs that target within one of these sites. As used herein, an iRNA is said to target within a particular site of an RNA transcript if the iRNA promotes cleavage of the transcript anywhere within that particular site. Such an iRNA will generally include at least about 15 contiguous nucleotides from one of the sequences provided in any one of Tables 3, 4, 5, 6, 18, 19, 20, 21, and 23 coupled to additional nucleotide sequences taken from the region contiguous to the selected sequence in a C5 gene.

[0204] While a target sequence is generally about 15-30 nucleotides in length, there is wide variation in the suitability of particular sequences in this range for directing cleavage of any given target RNA. Various software packages and the guidelines set out herein provide guidance for the identification of optimal target sequences for any given gene target, but an empirical approach can also be taken in which a “window” or “mask” of a given size (as a non-limiting example, 21 nucleotides) is literally or figuratively (including, e.g., in silico) placed on the target RNA sequence to identify sequences in the size range that can serve as target sequences. By moving the sequence “window” progressively one nucleotide upstream or downstream of an initial target sequence location, the next potential target sequence can be identified, until the complete set of possible sequences is identified for any given target size selected. This process, coupled with systematic synthesis and testing of the identified sequences (using assays as described herein or as known in the art) to identify those sequences that perform optimally can identify those RNA sequences that, when targeted with an iRNA agent, mediate the best inhibition of target gene expression. Thus, while the sequences identified, for example, in any one of Tables 3, 4, 5, 6, 18, 19, 20, 21, and 23 represent effective target sequences, it is contemplated that further optimization of inhibition efficiency can be achieved by progressively “walking the window” one nucleotide upstream or downstream of the given sequences to identify sequences with equal or better inhibition characteristics.

[0205] Further, it is contemplated that for any sequence identified, e.g., in any one of Tables 3, 4, 5, 6, 18, 19, 20, 21, and 23, further optimization could be achieved by systematically either adding or removing nucleotides to generate longer or shorter sequences and testing those sequences generated by walking a window of the longer or shorter size up or down the target RNA from that point. Again, coupling this approach to generating new candidate targets with testing for effectiveness of iRNAs based on those target sequences in an inhibition assay as known in the art and/or as described herein can lead to further improvements in the efficiency of inhibition. Further still, such optimized sequences can be adjusted by, e.g., the introduction of modified nucleotides as described herein or as known in the art, addition or changes in overhang, or other modifications as known in the art and/or discussed herein to further optimize the molecule (e.g., increasing serum stability or circulating half-life, increasing thermal stability, enhancing transmembrane delivery, targeting to a particular location or cell type, increasing interaction with silencing pathway enzymes, increasing release from endosomes) as an expression inhibitor.

[0206] An iRNA as described herein can contain one or more mismatches to the target sequence. In one embodiment, an iRNA as described herein contains no more than 3 mismatches. If the antisense strand of the iRNA contains mismatches to a target sequence, it is preferable that the area of mismatch is not located in the center of the region of complementarity. If the antisense strand of the iRNA contains mismatches to the target sequence, it is preferable that the mismatch be restricted to be within the last 5 nucleotides from either the 5′- or 3′-end of the region of complementarity. For example, for a 23 nucleotide iRNA agent the strand which is complementary to a region of a C5 gene, generally does not contain any mismatch within the central 13 nucleotides. The methods described herein or methods known in the art can be used to determine whether an iRNA containing a mismatch to a target sequence is effective in inhibiting the expression of a C5 gene. Consideration of the efficacy of iRNAs with mismatches in inhibiting expression of a C5 gene is important, especially if the particular region of complementarity in a C5 gene is known to have polymorphic sequence variation within the population.

### III. Modified iRNAs of the Invention

[0207] In one embodiment, the RNA of the iRNA of the invention e.g., a dsRNA, is un-modified, and does not comprise, e.g., chemical modifications and/or conjugations known in the art and described herein. In another embodiment, the RNA of an iRNA of the invention, e.g., a dsRNA, is chemically modified to enhance stability or other beneficial characteristics. In certain embodiments of the invention, substantially all of the nucleotides of an iRNA of the invention are modified. In other embodiments of the invention, all of the nucleotides of an iRNA of the invention are modified. iRNAs of the invention in which “substantially all of the nucleotides are modified” are largely but not wholly modified and can include not more than 5, 4, 3, 2, or 1 unmodified nucleotides.

[0208] The nucleic acids featured in the invention can be synthesized and/or modified by methods well established in the art, such as those described in “Current protocols in nucleic acid chemistry,” Beaucage, S. L. et al. (Edrs.), John Wiley & Sons, Inc., New York, N.Y., USA, which is hereby incorporated herein by reference. Modifications include, for example, end modifications, e.g., 5′-end modifications (phosphorylation, conjugation, inverted linkages) or 3′-end modifications (conjugation, DNA nucleotides, inverted linkages, etc.); base modifications, e.g., replacement with stabilizing bases, destabilizing bases, or bases that base pair with an expanded repertoire of partners, removal of bases (abasic nucleotides), or conjugated bases; sugar modifications (e.g., at the 2′-position or 4′-position) or replacement of the sugar; and/or backbone modifications, including modification or replacement of the phosphodiester linkages. Specific examples of iRNA compounds useful in the embodiments described herein include, but are not limited to RNAs containing modified backbones or no natural internucleoside linkages. RNAs having modified backbones include, among others, those that do not have a phosphorus atom in the backbone. For the purposes of this specification, and as sometimes referenced in the art, modified RNAs that do not have a phosphorus atom in their internucleoside backbone can also be considered to be oligonucleosides. In some embodiments, a modified iRNA will have a phosphorus atom in its internucleoside backbone.

[0209] Modified RNA backbones include, for example, phosphorothioates, chiral phosphorothioates, phosphorodithioates, phosphotriesters, aminoalkylphosphotriesters, methyl and other alkyl phosphonates including 3′-alkylene phosphonates and chiral phosphonates, phosphinates, phosphoramidates including 3′-amino phosphoramidate and aminoalkylphosphoramidates, thionophosphoramidates, thionoalkylphosphonates, thionoalkylphosphotriesters, and boranophosphates having normal 3′-5′ linkages, 2′-5′-linked analogs of these, and those having inverted polarity wherein the adjacent pairs of nucleoside units are linked 3′-5′ to 5′-3′ or 2′-5′ to 5′-2′. Various salts, mixed salts and free acid forms are also included.

[0210] Representative U.S. patents that teach the preparation of the above phosphorus-containing linkages include, but are not limited to, U.S. Pat. Nos. 3,687,808; 4,469,863; 4,476,301; 5,023,243; 5,177,195; 5,188,897; 5,264,423; 5,276,019; 5,278,302; 5,286,717; 5,321,131; 5,399,676; 5,405,939; 5,453,496; 5,455,233; 5,466,677; 5,476,925; 5,519,126; 5,536,821; 5,541,316; 5,550,111; 5,563,253; 5,571,799; 5,587,361; 5,625,050; 6,028,188; 6,124,445; 6,160,109; 6,169,170; 6,172,209; 6,239,265; 6,277,603; 6,326,199; 6,346,614; 6,444,423; 6,531,590; 6,534,639; 6,608,035; 6,683,167; 6,858,715; 6,867,294; 6,878,805; 7,015,315; 7,041,816; 7,273,933; 7,321,029; and U.S. Pat. RE39464, the entire contents of each of which are hereby incorporated herein by reference.

[0211] Modified RNA backbones that do not include a phosphorus atom therein have backbones that are formed by short chain alkyl or cycloalkyl internucleoside linkages, mixed heteroatoms and alkyl or cycloalkyl internucleoside linkages, or one or more short chain heteroatomic or heterocyclic internucleoside linkages. These include those having morpholino linkages (formed in part from the sugar portion of a nucleoside); siloxane backbones; sulfide, sulfoxide and sulfone backbones; formacetyl and thioformacetyl backbones; methylene formacetyl and thioformacetyl backbones; alkene containing backbones; sulfamate backbones; methyleneimino and methylenehydrazino backbones; sulfonate and sulfonamide backbones; amide backbones; and others having mixed N, O, S and CH₂ component parts.

[0212] Representative U.S. patents that teach the preparation of the above oligonucleosides include, but are not limited to, U.S. Pat. Nos. 5,034,506; 5,166,315; 5,185,444; 5,214,134; 5,216,141; 5,235,033; 5,64,562; 5,264,564; 5,405,938; 5,434,257; 5,466,677; 5,470,967; 5,489,677; 5,541,307; 5,561,225; 5,596,086; 5,602,240; 5,608,046; 5,610,289; 5,618,704; 5,623,070; 5,663,312; 5,633,360; 5,677,437; and, 5,677,439, the entire contents of each of which are hereby incorporated herein by reference.

[0213] In other embodiments, suitable RNA mimetics are contemplated for use in iRNAs, in which both the sugar and the internucleoside linkage, i.e., the backbone, of the nucleotide units are replaced with novel groups. The base units are maintained for hybridization with an appropriate nucleic acid target compound. One such oligomeric compound, an RNA mimetic that has been shown to have excellent hybridization properties, is referred to as a peptide nucleic acid (PNA). In PNA compounds, the sugar backbone of an RNA is replaced with an amide containing backbone, in particular an aminoethylglycine backbone. The nucleobases are retained and are bound directly or indirectly to aza nitrogen atoms of the amide portion of the backbone. Representative U.S. patents that teach the preparation of PNA compounds include, but are not limited to, U.S. Pat. Nos. 5,539,082; 5,714,331; and 5,719,262, the entire contents of each of which are hereby incorporated herein by reference. Additional PNA compounds suitable for use in the iRNAs of the invention are described in, for example, in Nielsen et al., Science, 1991, 254, 1497-1500.

[0214] Some embodiments featured in the invention include RNAs with phosphorothioate backbones and oligonucleosides with heteroatom backbones, and in particular—CH₂—NH—CH₂—, —CH₂—N(CH₃)—O—CH₂—[known as a methylene (methylimino) or MMI backbone], —CH₂—O—N(CH₃)—CH₂—, —CH₂—N(CH₃)—N(CH₃)—CH₂— and —N(CH₃)—CH₂—CH₂—[wherein the native phosphodiester backbone is represented as —O—P—O—CH₂—] of the above-referenced U.S. Pat. No. 5,489,677, and the amide backbones of the above-referenced U.S. Pat. No. 5,602,240. In some embodiments, the RNAs featured herein have morpholino backbone structures of the above-referenced U.S. Pat. No. 5,034,506.

[0215] Modified RNAs can also contain one or more substituted sugar moieties. The iRNAs, e.g., dsRNAs, featured herein can include one of the following at the 2′-position: OH; F; O-, S-, or N-alkyl; O-, S-, or N-alkenyl; O-, S- or N-alkynyl; or O-alkyl-O-alkyl, wherein the alkyl, alkenyl and alkynyl can be substituted or unsubstituted C₁ to C₁₀ alkyl or C₂ to C₁₀ alkenyl and alkynyl. Exemplary suitable modifications include O[(CH₂)ₙO]ₘCH₃, O(CH₂).ₙOCH₃, O(CH₂)ₙNH₂, O(CH₂)ₙCH₃, O(CH₂)ₙONH₂, and O(CH₂)ₙON[(CH₂)ₙCH₃)]₂, where n and m are from 1 to about 10. In other embodiments, dsRNAs include one of the following at the 2′ position: C₁ to C₁₀ lower alkyl, substituted lower alkyl, alkaryl, aralkyl, O-alkaryl or O-aralkyl, SH, SCH₃, OCN, Cl, Br, CN, CF₃, OCF₃, SOCH₃, SO₂CH₃, ONO₂, NO₂, N₃, NH₂, heterocycloalkyl, heterocycloalkaryl, aminoalkylamino, polyalkylamino, substituted silyl, an RNA cleaving group, a reporter group, an intercalator, a group for improving the pharmacokinetic properties of an iRNA, or a group for improving the pharmacodynamic properties of an iRNA, and other substituents having similar properties. In some embodiments, the modification includes a 2′-methoxyethoxy (2′-O—CH₂CH₂OCH₃, also known as 2′-O-(2-methoxyethyl) or 2′-MOE) (Martin et al., Helv. Chin. Acta, 1995, 78:486-504) i.e., an alkoxy-alkoxy group. Another exemplary modification is 2′-dimethylaminooxyethoxy, i.e., a O(CH₂)₂ON(CH₃)₂ group, also known as 2′-DMAOE, as described in examples herein below, and 2′-dimethylaminoethoxyethoxy (also known in the art as 2′-O-dimethylaminoethoxyethyl or 2′-DMAEOE), i.e., 2′-O—CH₂—O—CH₂—N(CH₂)₂.

[0216] Other modifications include 2′-methoxy (2′-OCH₃), 2′-aminopropoxy (2′-OCH₂CH₂CH₂NH₂) and 2′-fluoro (2′-F). Similar modifications can also be made at other positions on the RNA of an iRNA, particularly the 3′ position of the sugar on the 3′ terminal nucleotide or in 2′-5′ linked dsRNAs and the 5′ position of 5′ terminal nucleotide. iRNAs can also have sugar mimetics such as cyclobutyl moieties in place of the pentofuranosyl sugar. Representative U.S. patents that teach the preparation of such modified sugar structures include, but are not limited to, U.S. Pat. Nos. 4,981,957; 5,118,800; 5,319,080; 5,359,044; 5,393,878; 5,446,137; 5,466,786; 5,514,785; 5,519,134; 5,567,811; 5,576,427; 5,591,722; 5,597,909; 5,610,300; 5,627,053; 5,639,873; 5,646,265; 5,658,873; 5,670,633; and 5,700,920, certain of which are commonly owned with the instant application. The entire contents of each of the foregoing are hereby incorporated herein by reference.

[0217] An iRNA can also include nucleobase (often referred to in the art simply as “base”) modifications or substitutions. As used herein, “unmodified” or “natural” nucleobases include the purine bases adenine (A) and guanine (G), and the pyrimidine bases thymine (T), cytosine (C) and uracil (U). Modified nucleobases include other synthetic and natural nucleobases such as deoxy-thymine (dT), 5-methylcytosine (5-me-C), 5-hydroxymethyl cytosine, xanthine, hypoxanthine, 2-aminoadenine, 6-methyl and other alkyl derivatives of adenine and guanine, 2-propyl and other alkyl derivatives of adenine and guanine, 2-thiouracil, 2-thiothymine and 2-thiocytosine, 5-halouracil and cytosine, 5-propynyl uracil and cytosine, 6-azo uracil, cytosine and thymine, 5-uracil (pseudouracil), 4-thiouracil, 8-halo, 8-amino, 8-thiol, 8-thioalkyl, 8-hydroxyl anal other 8-substituted adenines and guanines, 5-halo, particularly 5-bromo, 5-trifluoromethyl and other 5-substituted uracils and cytosines, 7-methylguanine and 7-methyladenine, 8-azaguanine and 8-azaadenine, 7-deazaguanine and 7-daazaadenine and 3-deazaguanine and 3-deazaadenine. Further nucleobases include those disclosed in U.S. Pat. No. 3,687,808, those disclosed in Modified Nucleosides in Biochemistry, Biotechnology and Medicine, Herdewijn, P. ed. Wiley-VCH, 2008; those disclosed in The Concise Encyclopedia Of Polymer Science And Engineering, pages 858-859, Kroschwitz, J. L, ed. John Wiley & Sons, 1990, these disclosed by Englisch et al., Angewandte Chemie, International Edition, 1991, 30, 613, and those disclosed by Sanghvi, Y S., Chapter 15, dsRNA Research and Applications, pages 289-302, Crooke, S. T. and Lebleu, B., Ed., CRC Press, 1993. Certain of these nucleobases are particularly useful for increasing the binding affinity of the oligomeric compounds featured in the invention. These include 5-substituted pyrimidines, 6-azapyrimidines and N-2, N-6 and 0-6 substituted purines, including 2-aminopropyladenine, 5-propynyluracil and 5-propynylcytosine. 5-methylcytosine substitutions have been shown to increase nucleic acid duplex stability by 0.6-1.2° C. (Sanghvi, Y. S., Crooke, S. T. and Lebleu, B., Eds., dsRNA Research and Applications, CRC Press, Boca Raton, 1993, pp. 276-278) and are exemplary base substitutions, even more particularly when combined with 2′-O-methoxyethyl sugar modifications.

[0218] Representative U.S. patents that teach the preparation of certain of the above noted modified nucleobases as well as other modified nucleobases include, but are not limited to, the above noted U.S. Pat. Nos. 3,687,808, 4,845,205; 5,130,30; 5,134,066; 5,175,273; 5,367,066; 5,432,272; 5,457,187; 5,459,255; 5,484,908; 5,502,177; 5,525,711; 5,552,540; 5,587,469; 5,594,121, 5,596,091; 5,614,617; 5,681,941; 5,750,692; 6,015,886; 6,147,200; 6,166,197; 6,222,025; 6,235,887; 6,380,368; 6,528,640; 6,639,062; 6,617,438; 7,045,610; 7,427,672; and 7,495,088, the entire contents of each of which are hereby incorporated herein by reference.

[0219] The RNA of an iRNA can also be modified to include one or more bicyclic sugar moities. A “bicyclic sugar” is a furanosyl ring modified by the bridging of two atoms. A “bicyclic nucleoside” (“BNA”) is a nucleoside having a sugar moiety comprising a bridge connecting two carbon atoms of the sugar ring, thereby forming a bicyclic ring system. In certain embodiments, the bridge connects the 4′-carbon and the 2′-carbon of the sugar ring. Thus, in some embodiments an agent of the invention may include the RNA of an iRNA can also be modified to include one or more locked nucleic acids (LNA). A locked nucleic acid is a nucleotide having a modified ribose moiety in which the ribose moiety comprises an extra bridge connecting the 2′ and 4′ carbons. In other words, an LNA is a nucleotide comprising a bicyclic sugar moiety comprising a 4′-CH2-O-2′ bridge. This structure effectively “locks” the ribose in the 3′-endo structural conformation. The addition of locked nucleic acids to siRNAs has been shown to increase siRNA stability in serum, and to reduce off-target effects (Elmen, J. et al., (2005) Nucleic Acids Research 33(1):439-447; Mook, O R. et al., (2007) Mol Canc Ther 6(3):833-843; Grunweller, A. et al., (2003) Nucleic Acids Research 31(12):3185-3193).

[0220] Examples of bicyclic nucleosides for use in the polynucleotides of the invention include without limitation nucleosides comprising a bridge between the 4′ and the 2′ ribosyl ring atoms. In certain embodiments, the antisense polynucleotide agents of the invention include one or more bicyclic nucleosides comprising a 4′ to 2′ bridge. Examples of such 4′ to 2′ bridged bicyclic nucleosides, include but are not limited to 4′-(CH2)-O-2′ (LNA); 4′-(CH2)-S-2′; 4′-(CH2)2-O-2′ (ENA); 4′-CH(CH3)-O-2′ (also referred to as “constrained ethyl” or “cEt”) and 4′-CH(CH2OCH3)-O-2′ (and analogs thereof; see, e.g., U.S. Pat. No. 7,399,845); 4′-C(CH3)(CH3)-O-2′ (and analogs thereof; see e.g., U.S. Pat. No. 8,278,283); 4′-CH2-N(OCH3)-2′ (and analogs thereof; see e.g., U.S. Pat. No. 8,278,425); 4′-CH2-O—N(CH3)-2′ (see, e.g., U.S. Patent Publication No. 2004/0171570); 4′-CH2-N(R)—O-2′, wherein R is H, C1-C12 alkyl, or a protecting group (see, e.g., U.S. Pat. No. 7,427,672); 4′-CH2-C(H)(CH3)-2′ (see, e.g., Chattopadhyaya et al., J. Org. Chem., 2009, 74, 118-134); and 4′-CH2-C(═CH2)-2′ (and analogs thereof; see, e.g., U.S. Pat. No. 8,278,426). The entire contents of each of the foregoing are hereby incorporated herein by reference.

[0221] Additional representative U.S. Patents and US Patent Publications that teach the preparation of locked nucleic acid nucleotides include, but are not limited to, the following: U.S. Pat. Nos. 6,268,490; 6,525,191; 6,670,461; 6,770,748; 6,794,499; 6,998,484; 7,053,207; 7,034,133; 7,084,125; 7,399,845; 7,427,672; 7,569,686; 7,741,457; 8,022,193; 8,030,467; 8,278,425; 8,278,426; 8,278,283; US 2008/0039618; and US 2009/0012281, the entire contents of each of which are hereby incorporated herein by reference.

[0222] Any of the foregoing bicyclic nucleosides can be prepared having one or more stereochemical sugar configurations including for example α-L-ribofuranose and β-D-ribofuranose (see WO 99/14226).

[0223] The RNA of an iRNA can also be modified to include one or more constrained ethyl nucleotides. As used herein, a “constrained ethyl nucleotide” or “cEt” is a locked nucleic acid comprising a bicyclic sugar moiety comprising a 4′-CH(CH3)-O-2′ bridge. In one embodiment, a constrained ethyl nucleotide is in the S conformation referred to herein as “5-cEt.”

[0224] An iRNA of the invention may also include one or more “conformationally restricted nucleotides” (“CRN”). CRN are nucleotide analogs with a linker connecting the C2′ and C4′ carbons of ribose or the C3 and -C5′ carbons of ribose. CRN lock the ribose ring into a stable conformation and increase the hybridization affinity to mRNA. The linker is of sufficient length to place the oxygen in an optimal position for stability and affinity resulting in less ribose ring puckering.

[0225] Representative publications that teach the preparation of certain of the above noted CRN include, but are not limited to, US Patent Publication No. 2013/0190383; and PCT publication WO 2013/036868, the entire contents of each of which are hereby incorporated herein by reference.

[0226] One or more of the nucleotides of an iRNA of the invention may also include a hydroxymethyl substituted nucleotide. A “hydroxymethyl substituted nucleotide” is an acyclic 2′-3′-seco-nucleotide, also referred to as an “unlocked nucleic acid” (“UNA”) modification

[0227] Representative U.S. publications that teach the preparation of UNA include, but are not limited to, U.S. Pat. No. 8,314,227; and US Patent Publication Nos. 2013/0096289; 2013/0011922; and 2011/0313020, the entire contents of each of which are hereby incorporated herein by reference.

[0228] Potentially stabilizing modifications to the ends of RNA molecules can include N-(acetylaminocaproyl)-4-hydroxyprolinol (Hyp-C6-NHAc), N-(caproyl-4-hydroxyprolinol (Hyp-C6), N-(acetyl-4-hydroxyprolinol (Hyp-NHAc), thymidine-2′-O-deoxythymidine (ether), N-(aminocaproyl)-4-hydroxyprolinol (Hyp-C6-amino), 2-docosanoyl-uridine-3″-phosphate, inverted base dT(idT) and others. Disclosure of this modification can be found in PCT Publication No. WO 2011/005861.

[0229] A. Modified iRNAs Comprising Motifs of the Invention

[0230] In certain aspects of the invention, the double stranded RNAi agents of the invention include agents with chemical modifications as disclosed, for example, in U.S. Provisional Application No. 61/561,710, filed on Nov. 18, 2011, or in PCT/US2012/065691, filed on Nov. 16, 2012, the entire contents of each of which are incorporated herein by reference.

[0231] As shown herein and in Provisional Application No. 61/561,710 or PCT Application No. PCT/US2012/065691, a superior result may be obtained by introducing one or more motifs of three identical modifications on three consecutive nucleotides into a sense strand and/or antisense strand of an RNAi agent, particularly at or near the cleavage site. In some embodiments, the sense strand and antisense strand of the RNAi agent may otherwise be completely modified. The introduction of these motifs interrupts the modification pattern, if present, of the sense and/or antisense strand. The RNAi agent may be optionally conjugated with a GalNAc derivative ligand, for instance on the sense strand. The resulting RNAi agents present superior gene silencing activity.

[0232] More specifically, it has been surprisingly discovered that when the sense strand and antisense strand of the double stranded RNAi agent are completely modified to have one or more motifs of three identical modifications on three consecutive nucleotides at or near the cleavage site of at least one strand of an RNAi agent, the gene silencing activity of the RNAi agent was superiorly enhanced.

[0233] Accordingly, the invention provides double stranded RNAi agents capable of inhibiting the expression of a target gene (i.e., a complement component C5 (C5) gene) in vivo. The RNAi agent comprises a sense strand and an antisense strand. Each strand of the RNAi agent may range from 12-30 nucleotides in length. For example, each strand may be between 14-30 nucleotides in length, 17-30 nucleotides in length, 25-30 nucleotides in length, 27-30 nucleotides in length, 17-23 nucleotides in length, 17-21 nucleotides in length, 17-19 nucleotides in length, 19-25 nucleotides in length, 19-23 nucleotides in length, 19-21 nucleotides in length, 21-25 nucleotides in length, or 21-23 nucleotides in length.

[0234] The sense strand and antisense strand typically form a duplex double stranded RNA (“dsRNA”), also referred to herein as an “RNAi agent.” The duplex region of an RNAi agent may be 12-30 nucleotide pairs in length. For example, the duplex region can be between 14-30 nucleotide pairs in length, 17-30 nucleotide pairs in length, 27-30 nucleotide pairs in length, 17-23 nucleotide pairs in length, 17-21 nucleotide pairs in length, 17-19 nucleotide pairs in length, 19-25 nucleotide pairs in length, 19-23 nucleotide pairs in length, 19-21 nucleotide pairs in length, 21-25 nucleotide pairs in length, or 21-23 nucleotide pairs in length. In another example, the duplex region is selected from 15, 16, 17, 18, 19, 20, 21, 22, 23, 24, 25, 26, and 27 nucleotides in length.

[0235] In one embodiment, the RNAi agent may contain one or more overhang regions and/or capping groups at the 3′-end, 5′-end, or both ends of one or both strands. The overhang can be 1-6 nucleotides in length, for instance 2-6 nucleotides in length, 1-5 nucleotides in length, 2-5 nucleotides in length, 1-4 nucleotides in length, 2-4 nucleotides in length, 1-3 nucleotides in length, 2-3 nucleotides in length, or 1-2 nucleotides in length. The overhangs can be the result of one strand being longer than the other, or the result of two strands of the same length being staggered. The overhang can form a mismatch with the target mRNA or it can be complementary to the gene sequences being targeted or can be another sequence. The first and second strands can also be joined, e.g., by additional bases to form a hairpin, or by other non-base linkers.

[0236] In one embodiment, the nucleotides in the overhang region of the RNAi agent can each independently be a modified or unmodified nucleotide including, but no limited to 2′-sugar modified, such as, 2-F, 2′-Omethyl, thymidine (T), 2′-O-methoxyethyl-5-methyluridine (Teo), 2′-O-methoxyethyladenosine (Aeo), 2′-O-methoxyethyl-5-methylcytidine (m5Ceo), and any combinations thereof. For example, TT can be an overhang sequence for either end on either strand. The overhang can form a mismatch with the target mRNA or it can be complementary to the gene sequences being targeted or can be another sequence.

[0237] The 5′- or 3′-overhangs at the sense strand, antisense strand or both strands of the RNAi agent may be phosphorylated. In some embodiments, the overhang region(s) contains two nucleotides having a phosphorothioate between the two nucleotides, where the two nucleotides can be the same or different. In one embodiment, the overhang is present at the 3′-end of the sense strand, antisense strand, or both strands. In one embodiment, this 3′-overhang is present in the antisense strand. In one embodiment, this 3′-overhang is present in the sense strand.

[0238] The RNAi agent may contain only a single overhang, which can strengthen the interference activity of the RNAi, without affecting its overall stability. For example, the single-stranded overhang may be located at the 3′-terminal end of the sense strand or, alternatively, at the 3′-terminal end of the antisense strand. The RNAi may also have a blunt end, located at the 5′-end of the antisense strand (or the 3′-end of the sense strand) or vice versa. Generally, the antisense strand of the RNAi has a nucleotide overhang at the 3′-end, and the 5′-end is blunt. While not wishing to be bound by theory, the asymmetric blunt end at the 5′-end of the antisense strand and 3′-end overhang of the antisense strand favor the guide strand loading into RISC process.

[0239] In one embodiment, the RNAi agent is a double ended bluntmer of 19 nucleotides in length, wherein the sense strand contains at least one motif of three 2′-F modifications on three consecutive nucleotides at positions 7, 8, 9 from the 5′end. The antisense strand contains at least one motif of three 2′-O-methyl modifications on three consecutive nucleotides at positions 11, 12, 13 from the 5′end.

[0240] In another embodiment, the RNAi agent is a double ended bluntmer of 20 nucleotides in length, wherein the sense strand contains at least one motif of three 2′-F modifications on three consecutive nucleotides at positions 8, 9, 10 from the 5′end. The antisense strand contains at least one motif of three 2′-O-methyl modifications on three consecutive nucleotides at positions 11, 12, 13 from the 5′end.

[0241] In yet another embodiment, the RNAi agent is a double ended bluntmer of 21 nucleotides in length, wherein the sense strand contains at least one motif of three 2′-F modifications on three consecutive nucleotides at positions 9, 10, 11 from the 5′end. The antisense strand contains at least one motif of three 2′-O-methyl modifications on three consecutive nucleotides at positions 11, 12, 13 from the 5′end.

[0242] In one embodiment, the RNAi agent comprises a 21 nucleotide sense strand and a 23 nucleotide antisense strand, wherein the sense strand contains at least one motif of three 2′-F modifications on three consecutive nucleotides at positions 9, 10, 11 from the 5′end; the antisense strand contains at least one motif of three 2′-O-methyl modifications on three consecutive nucleotides at positions 11, 12, 13 from the 5′end, wherein one end of the RNAi agent is blunt, while the other end comprises a 2 nucleotide overhang. Preferably, the 2 nucleotide overhang is at the 3′-end of the antisense strand. When the 2 nucleotide overhang is at the 3′-end of the antisense strand, there may be two phosphorothioate internucleotide linkages between the terminal three nucleotides, wherein two of the three nucleotides are the overhang nucleotides, and the third nucleotide is a paired nucleotide next to the overhang nucleotide. In one embodiment, the RNAi agent additionally has two phosphorothioate internucleotide linkages between the terminal three nucleotides at both the 5′-end of the sense strand and at the 5′-end of the antisense strand. In one embodiment, every nucleotide in the sense strand and the antisense strand of the RNAi agent, including the nucleotides that are part of the motifs are modified nucleotides. In one embodiment each residue is independently modified with a 2′-O-methyl or 3′-fluoro, e.g., in an alternating motif. Optionally, the RNAi agent further comprises a ligand (preferably GalNAc₃).

[0243] In one embodiment, the RNAi agent comprises a sense and an antisense strand, wherein the sense strand is 25-30 nucleotide residues in length, wherein starting from the 5′ terminal nucleotide (position 1) positions 1 to 23 of the first strand comprise at least 8 ribonucleotides; the antisense strand is 36-66 nucleotide residues in length and, starting from the 3′ terminal nucleotide, comprises at least 8 ribonucleotides in the positions paired with positions 1-23 of sense strand to form a duplex; wherein at least the 3 ‘ terminal nucleotide of antisense strand is unpaired with sense strand, and up to 6 consecutive 3’ terminal nucleotides are unpaired with sense strand, thereby forming a 3′ single stranded overhang of 1-6 nucleotides; wherein the 5′ terminus of antisense strand comprises from 10-30 consecutive nucleotides which are unpaired with sense strand, thereby forming a 10-30 nucleotide single stranded 5′ overhang; wherein at least the sense strand 5′ terminal and 3′ terminal nucleotides are base paired with nucleotides of antisense strand when sense and antisense strands are aligned for maximum complementarity, thereby forming a substantially duplexed region between sense and antisense strands; and antisense strand is sufficiently complementary to a target RNA along at least 19 ribonucleotides of antisense strand length to reduce target gene expression when the double stranded nucleic acid is introduced into a mammalian cell; and wherein the sense strand contains at least one motif of three 2′-F modifications on three consecutive nucleotides, where at least one of the motifs occurs at or near the cleavage site. The antisense strand contains at least one motif of three 2′-O-methyl modifications on three consecutive nucleotides at or near the cleavage site.

[0244] In one embodiment, the RNAi agent comprises sense and antisense strands, wherein the RNAi agent comprises a first strand having a length which is at least 25 and at most 29 nucleotides and a second strand having a length which is at most 30 nucleotides with at least one motif of three 2′-O-methyl modifications on three consecutive nucleotides at position 11, 12, 13 from the 5′ end; wherein the 3′ end of the first strand and the 5′ end of the second strand form a blunt end and the second strand is 1-4 nucleotides longer at its 3′ end than the first strand, wherein the duplex region which is at least 25 nucleotides in length, and the second strand is sufficiently complementary to a target mRNA along at least 19 nucleotide of the second strand length to reduce target gene expression when the RNAi agent is introduced into a mammalian cell, and wherein dicer cleavage of the RNAi agent preferentially results in an siRNA comprising the 3′ end of the second strand, thereby reducing expression of the target gene in the mammal. Optionally, the RNAi agent further comprises a ligand.

[0245] In one embodiment, the sense strand of the RNAi agent contains at least one motif of three identical modifications on three consecutive nucleotides, where one of the motifs occurs at the cleavage site in the sense strand.

[0246] In one embodiment, the antisense strand of the RNAi agent can also contain at least one motif of three identical modifications on three consecutive nucleotides, where one of the motifs occurs at or near the cleavage site in the antisense strand

[0247] For an RNAi agent having a duplex region of 17-23 nucleotide in length, the cleavage site of the antisense strand is typically around the 10, 11 and 12 positions from the 5′-end. Thus the motifs of three identical modifications may occur at the 9, 10, 11 positions; 10, 11, 12 positions; 11, 12, 13 positions; 12, 13, 14 positions; or 13, 14, 15 positions of the antisense strand, the count starting from the 1^{st} nucleotide from the 5′-end of the antisense strand, or, the count starting from the 1^{st} paired nucleotide within the duplex region from the 5′-end of the antisense strand. The cleavage site in the antisense strand may also change according to the length of the duplex region of the RNAi from the 5′-end.

[0248] The sense strand of the RNAi agent may contain at least one motif of three identical modifications on three consecutive nucleotides at the cleavage site of the strand; and the antisense strand may have at least one motif of three identical modifications on three consecutive nucleotides at or near the cleavage site of the strand. When the sense strand and the antisense strand form a dsRNA duplex, the sense strand and the antisense strand can be so aligned that one motif of the three nucleotides on the sense strand and one motif of the three nucleotides on the antisense strand have at least one nucleotide overlap, i.e., at least one of the three nucleotides of the motif in the sense strand forms a base pair with at least one of the three nucleotides of the motif in the antisense strand. Alternatively, at least two nucleotides may overlap, or all three nucleotides may overlap.

[0249] In one embodiment, the sense strand of the RNAi agent may contain more than one motif of three identical modifications on three consecutive nucleotides. The first motif may occur at or near the cleavage site of the strand and the other motifs may be a wing modification. The term “wing modification” herein refers to a motif occurring at another portion of the strand that is separated from the motif at or near the cleavage site of the same strand. The wing modification is either adjacent to the first motif or is separated by at least one or more nucleotides. When the motifs are immediately adjacent to each other then the chemistry of the motifs are distinct from each other and when the motifs are separated by one or more nucleotide than the chemistries can be the same or different. Two or more wing modifications may be present. For instance, when two wing modifications are present, each wing modification may occur at one end relative to the first motif which is at or near cleavage site or on either side of the lead motif.

[0250] Like the sense strand, the antisense strand of the RNAi agent may contain more than one motifs of three identical modifications on three consecutive nucleotides, with at least one of the motifs occurring at or near the cleavage site of the strand. This antisense strand may also contain one or more wing modifications in an alignment similar to the wing modifications that may be present on the sense strand.

[0251] In one embodiment, the wing modification on the sense strand or antisense strand of the RNAi agent typically does not include the first one or two terminal nucleotides at the 3′-end, 5′-end or both ends of the strand.

[0252] In another embodiment, the wing modification on the sense strand or antisense strand of the RNAi agent typically does not include the first one or two paired nucleotides within the duplex region at the 3′-end, 5′-end or both ends of the strand.

[0253] When the sense strand and the antisense strand of the RNAi agent each contain at least one wing modification, the wing modifications may fall on the same end of the duplex region, and have an overlap of one, two or three nucleotides.

[0254] When the sense strand and the antisense strand of the RNAi agent each contain at least two wing modifications, the sense strand and the antisense strand can be so aligned that two modifications each from one strand fall on one end of the duplex region, having an overlap of one, two or three nucleotides; two modifications each from one strand fall on the other end of the duplex region, having an overlap of one, two or three nucleotides; two modifications one strand fall on each side of the lead motif, having an overlap of one, two or three nucleotides in the duplex region.

[0255] In one embodiment, every nucleotide in the sense strand and antisense strand of the RNAi agent, including the nucleotides that are part of the motifs, may be modified. Each nucleotide may be modified with the same or different modification which can include one or more alteration of one or both of the non-linking phosphate oxygens and/or of one or more of the linking phosphate oxygens; alteration of a constituent of the ribose sugar, e.g., of the 2′ hydroxyl on the ribose sugar; wholesale replacement of the phosphate moiety with “dephospho” linkers; modification or replacement of a naturally occurring base; and replacement or modification of the ribose-phosphate backbone.

[0256] As nucleic acids are polymers of subunits, many of the modifications occur at a position which is repeated within a nucleic acid, e.g., a modification of a base, or a phosphate moiety, or a non-linking O of a phosphate moiety. In some cases the modification will occur at all of the subject positions in the nucleic acid but in many cases it will not. By way of example, a modification may only occur at a 3′ or 5′ terminal position, may only occur in a terminal region, e.g., at a position on a terminal nucleotide or in the last 2, 3, 4, 5, or 10 nucleotides of a strand. A modification may occur in a double strand region, a single strand region, or in both. A modification may occur only in the double strand region of a RNA or may only occur in a single strand region of a RNA. For example, a phosphorothioate modification at a non-linking O position may only occur at one or both termini, may only occur in a terminal region, e.g., at a position on a terminal nucleotide or in the last 2, 3, 4, 5, or 10 nucleotides of a strand, or may occur in double strand and single strand regions, particularly at termini. The 5′ end or ends can be phosphorylated.

[0257] It may be possible, e.g., to enhance stability, to include particular bases in overhangs, or to include modified nucleotides or nucleotide surrogates, in single strand overhangs, e.g., in a 5′ or 3′ overhang, or in both. For example, it can be desirable to include purine nucleotides in overhangs. In some embodiments all or some of the bases in a 3′ or 5′ overhang may be modified, e.g., with a modification described herein. Modifications can include, e.g., the use of modifications at the 2′ position of the ribose sugar with modifications that are known in the art, e.g., the use of deoxyribonucleotides, 2′-deoxy-2′-fluoro (2′-F) or 2′-O-methyl modified instead of the ribosugar of the nucleobase, and modifications in the phosphate group, e.g., phosphorothioate modifications. Overhangs need not be homologous with the target sequence.

[0258] In one embodiment, each residue of the sense strand and antisense strand is independently modified with LNA, HNA, CeNA, 2′-methoxyethyl, 2′-O-methyl, 2′-O-allyl, 2′-C-allyl, 2′-deoxy, 2′-hydroxyl, or 2′-fluoro. The strands can contain more than one modification. In one embodiment, each residue of the sense strand and antisense strand is independently modified with 2′-O-methyl or 2′-fluoro.

[0259] At least two different modifications are typically present on the sense strand and antisense strand. Those two modifications may be the 2′-O-methyl or 2′-fluoro modifications, or others.

[0260] In one embodiment, the Nₐ and/or N_{b} comprise modifications of an alternating pattern. The term “alternating motif” as used herein refers to a motif having one or more modifications, each modification occurring on alternating nucleotides of one strand. The alternating nucleotide may refer to one per every other nucleotide or one per every three nucleotides, or a similar pattern. For example, if A, B and C each represent one type of modification to the nucleotide, the alternating motif can be “ABABABABABAB . . . ,” “AABBAABBAABB . . . ,” “AABAABAABAAB . . . ,” “AAABAAABAAAB . . . ,” “AAABBBAAABBB . . . ,” or “ABCABCABCABC . . . ,” etc.

[0261] The type of modifications contained in the alternating motif may be the same or different. For example, if A, B, C, D each represent one type of modification on the nucleotide, the alternating pattern, i.e., modifications on every other nucleotide, may be the same, but each of the sense strand or antisense strand can be selected from several possibilities of modifications within the alternating motif such as “ABABAB . . . ”, “ACACAC . . . ” “BDBDBD . . . ” or “CDCDCD . . . ,” etc.

[0262] In one embodiment, the RNAi agent of the invention comprises the modification pattern for the alternating motif on the sense strand relative to the modification pattern for the alternating motif on the antisense strand is shifted. The shift may be such that the modified group of nucleotides of the sense strand corresponds to a differently modified group of nucleotides of the antisense strand and vice versa. For example, the sense strand when paired with the antisense strand in the dsRNA duplex, the alternating motif in the sense strand may start with “ABABAB” from 5′-3′ of the strand and the alternating motif in the antisense strand may start with “BABABA” from 5′-3′ of the strand within the duplex region. As another example, the alternating motif in the sense strand may start with “AABBAABB” from 5′-3′ of the strand and the alternating motif in the antisense strand may start with “BBAABBAA” from 5′-3′ of the strand within the duplex region, so that there is a complete or partial shift of the modification patterns between the sense strand and the antisense strand.

[0263] In one embodiment, the RNAi agent comprises the pattern of the alternating motif of 2′-O-methyl modification and 2′-F modification on the sense strand initially has a shift relative to the pattern of the alternating motif of 2′-O-methyl modification and 2′-F modification on the antisense strand initially, i.e., the 2′-O-methyl modified nucleotide on the sense strand base pairs with a 2′-F modified nucleotide on the antisense strand and vice versa. The 1 position of the sense strand may start with the 2′-F modification, and the 1 position of the antisense strand may start with the 2′-O-methyl modification.

[0264] The introduction of one or more motifs of three identical modifications on three consecutive nucleotides to the sense strand and/or antisense strand interrupts the initial modification pattern present in the sense strand and/or antisense strand. This interruption of the modification pattern of the sense and/or antisense strand by introducing one or more motifs of three identical modifications on three consecutive nucleotides to the sense and/or antisense strand surprisingly enhances the gene silencing activity to the target gene.

[0265] In one embodiment, when the motif of three identical modifications on three consecutive nucleotides is introduced to any of the strands, the modification of the nucleotide next to the motif is a different modification than the modification of the motif. For example, the portion of the sequence containing the motif is “ . . . NₐYYYN_{b} . . . ,” where “Y” represents the modification of the motif of three identical modifications on three consecutive nucleotide, and “Nₐ” and “N_{b}” represent a modification to the nucleotide next to the motif “YYY” that is different than the modification of Y, and where Nₐ and N_{b} can be the same or different modifications. Alternatively, Nₐ and/or N_{b} may be present or absent when there is a wing modification present.

[0266] The RNAi agent may further comprise at least one phosphorothioate or methylphosphonate internucleotide linkage. The phosphorothioate or methylphosphonate internucleotide linkage modification may occur on any nucleotide of the sense strand or antisense strand or both strands in any position of the strand. For instance, the internucleotide linkage modification may occur on every nucleotide on the sense strand and/or antisense strand; each internucleotide linkage modification may occur in an alternating pattern on the sense strand and/or antisense strand; or the sense strand or antisense strand may contain both internucleotide linkage modifications in an alternating pattern. The alternating pattern of the internucleotide linkage modification on the sense strand may be the same or different from the antisense strand, and the alternating pattern of the internucleotide linkage modification on the sense strand may have a shift relative to the alternating pattern of the internucleotide linkage modification on the antisense strand. In one embodiment, a double-stranded RNAi agent comprises 6-8phosphorothioate internucleotide linkages. In one embodiment, the antisense strand comprises two phosphorothioate internucleotide linkages at the 5′-terminus and two phosphorothioate internucleotide linkages at the 3′-terminus, and the sense strand comprises at least two phosphorothioate internucleotide linkages at either the 5′-terminus or the 3′-terminus.

[0267] In one embodiment, the RNAi comprises a phosphorothioate or methylphosphonate internucleotide linkage modification in the overhang region. For example, the overhang region may contain two nucleotides having a phosphorothioate or methylphosphonate internucleotide linkage between the two nucleotides. Internucleotide linkage modifications also may be made to link the overhang nucleotides with the terminal paired nucleotides within the duplex region. For example, at least 2, 3, 4, or all the overhang nucleotides may be linked through phosphorothioate or methylphosphonate internucleotide linkage, and optionally, there may be additional phosphorothioate or methylphosphonate internucleotide linkages linking the overhang nucleotide with a paired nucleotide that is next to the overhang nucleotide. For instance, there may be at least two phosphorothioate internucleotide linkages between the terminal three nucleotides, in which two of the three nucleotides are overhang nucleotides, and the third is a paired nucleotide next to the overhang nucleotide. These terminal three nucleotides may be at the 3′-end of the antisense strand, the 3′-end of the sense strand, the 5′-end of the antisense strand, and/or the 5′end of the antisense strand.

[0268] In one embodiment, the 2 nucleotide overhang is at the 3′-end of the antisense strand, and there are two phosphorothioate internucleotide linkages between the terminal three nucleotides, wherein two of the three nucleotides are the overhang nucleotides, and the third nucleotide is a paired nucleotide next to the overhang nucleotide. Optionally, the RNAi agent may additionally have two phosphorothioate internucleotide linkages between the terminal three nucleotides at both the 5′-end of the sense strand and at the 5′-end of the antisense strand.

[0269] In one embodiment, the RNAi agent comprises mismatch(es) with the target, within the duplex, or combinations thereof. The mistmatch may occur in the overhang region or the duplex region. The base pair may be ranked on the basis of their propensity to promote dissociation or melting (e.g., on the free energy of association or dissociation of a particular pairing, the simplest approach is to examine the pairs on an individual pair basis, though next neighbor or similar analysis can also be used). In terms of promoting dissociation: A:U is preferred over G:C; G:U is preferred over G:C; and I:C is preferred over G:C (I=inosine). Mismatches, e.g., non-canonical or other than canonical pairings (as described elsewhere herein) are preferred over canonical (A:T, A:U, G:C) pairings; and pairings which include a universal base are preferred over canonical pairings.

[0270] In one embodiment, the RNAi agent comprises at least one of the first 1, 2, 3, 4, or 5 base pairs within the duplex regions from the 5′-end of the antisense strand independently selected from the group of: A:U, G:U, I:C, and mismatched pairs, e.g., non-canonical or other than canonical pairings or pairings which include a universal base, to promote the dissociation of the antisense strand at the 5′-end of the duplex.

[0271] In one embodiment, the nucleotide at the 1 position within the duplex region from the 5′-end in the antisense strand is selected from the group consisting of A, dA, dU, U, and dT. Alternatively, at least one of the first 1, 2 or 3 base pair within the duplex region from the 5′-end of the antisense strand is an AU base pair. For example, the first base pair within the duplex region from the 5′-end of the antisense strand is an AU base pair.

[0272] In another embodiment, the nucleotide at the 3′-end of the sense strand is deoxy-thymine (dT). In another embodiment, the nucleotide at the 3′-end of the antisense strand is deoxy-thymine (dT). In one embodiment, there is a short sequence of deoxy-thymine nucleotides, for example, two dT nucleotides on the 3′-end of the sense and/or antisense strand.

[0273] In one embodiment, the sense strand sequence may be represented by formula (I):

5′nₚ-Nₐ—(XXX)ᵢ—N_{b}—YYY—N_{b}—(ZZZ)ⱼ—Nₐ-n_{q}3′ (I)

[0274] wherein:

[0275] i and j are each independently 0 or 1;

[0276] p and q are each independently 0-6;

[0277] each Nₐ independently represents an oligonucleotide sequence comprising 0-25 modified nucleotides, each sequence comprising at least two differently modified nucleotides;

[0278] each N_{b} independently represents an oligonucleotide sequence comprising 0-10 modified nucleotides;

[0279] each nₚ and n_{q} independently represent an overhang nucleotide;

[0280] wherein N_{b} and Y do not have the same modification; and

[0281] XXX, YYY and ZZZ each independently represent one motif of three identical modifications on three consecutive nucleotides. Preferably YYY is all 2′-F modified nucleotides.

[0282] In one embodiment, the Nₐ and/or N_{b} comprise modifications of alternating pattern.

[0283] In one embodiment, the YYY motif occurs at or near the cleavage site of the sense strand. For example, when the RNAi agent has a duplex region of 17-23 nucleotides in length, the YYY motif can occur at or the vicinity of the cleavage site (e.g.: can occur at positions 6, 7, 8, 7, 8, 9, 8, 9, 10, 9, 10, 11, 10, 11, 12 or 11, 12, 13) of—the sense strand, the count starting from the 1^{st} nucleotide, from the 5′-end; or optionally, the count starting at the 1^{st} paired nucleotide within the duplex region, from the 5′-end.

[0284] In one embodiment, i is 1 and j is 0, or i is 0 and j is 1, or both i and j are 1. The sense strand can therefore be represented by the following formulas:

5′nₚ-Nₐ—YYY—N_{b}—ZZZ—Nₐ-n_{q}3′ (Ib);

5′nₚ-Nₐ—XXX—N_{b}—YYY—Nₐ-n_{q}3′ (Ic); or

5′nₚ-Nₐ—XXX—N_{b}—YYY—N_{b}—ZZZ—Nₐ-n_{q}3′ (Id).

[0285] When the sense strand is represented by formula (Ib), N_{b} represents an oligonucleotide sequence comprising 0-10, 0-7, 0-5, 0-4, 0-2 or 0 modified nucleotides. Each Nₐ independently can represent an oligonucleotide sequence comprising 2-20, 2-15, or 2-10 modified nucleotides.

[0286] When the sense strand is represented as formula (Ic), N_{b} represents an oligonucleotide sequence comprising 0-10, 0-7, 0-10, 0-7, 0-5, 0-4, 0-2 or 0 modified nucleotides. Each Nₐ can independently represent an oligonucleotide sequence comprising 2-20, 2-15, or 2-10 modified nucleotides.

[0287] When the sense strand is represented as formula (Id), each N_{b} independently represents an oligonucleotide sequence comprising 0-10, 0-7, 0-5, 0-4, 0-2 or 0 modified nucleotides. Preferably, N_{b} is 0, 1, 2, 3, 4, 5 or 6 Each Nₐ can independently represent an oligonucleotide sequence comprising 2-20, 2-15, or 2-10 modified nucleotides.

[0288] Each of X, Y and Z may be the same or different from each other.

[0289] In other embodiments, i is 0 and j is 0, and the sense strand may be represented by the formula:

5′nₚ-Nₐ—YYY—Nₐ-n_{q}3′ (Ia).

[0290] When the sense strand is represented by formula (Ia), each Nₐ independently can represent an oligonucleotide sequence comprising 2-20, 2-15, or 2-10 modified nucleotides.

[0291] In one embodiment, the antisense strand sequence of the RNAi may be represented by formula (II):

5′n_{q′}-Nₐ′—(Z′Z′Z′)ₖ—N_{b}′—Y′Y′Y′—N_{b}′—(X′X′X′)ₗ—N′ₐnₚ′3′ (II)

[0292] wherein:

[0293] k and l are each independently 0 or 1;

[0294] p′ and q′ are each independently 0-6;

[0295] each Nₐ′ independently represents an oligonucleotide sequence comprising 0-25 modified nucleotides, each sequence comprising at least two differently modified nucleotides;

[0296] each N_{b}′ independently represents an oligonucleotide sequence comprising 0-10 modified nucleotides;

[0297] each nₚ′ and n_{q}′ independently represent an overhang nucleotide;

[0298] wherein N_{b}′ and Y′ do not have the same modification;

[0299] and

[0300] X′X′X′, Y′Y′Y′ and Z′Z′Z′ each independently represent one motif of three identical modifications on three consecutive nucleotides.

[0301] In one embodiment, the Nₐ′ and/or N_{b}′ comprise modifications of alternating pattern.

[0302] The Y′Y′Y′ motif occurs at or near the cleavage site of the antisense strand. For example, when the RNAi agent has a duplex region of 17-23nucleotidein length, the Y′Y′Y′ motif can occur at positions 9, 10, 11; 10, 11, 12; 11, 12, 13; 12, 13, 14; or 13, 14, 15 of the antisense strand, with the count starting from the 1^{st} nucleotide, from the 5′-end; or optionally, the count starting at the 1^{st} paired nucleotide within the duplex region, from the 5′-end. Preferably, the Y′Y′Y′ motif occurs at positions 11, 12, 13.

[0303] In one embodiment, Y′Y′Y′ motif is all 2′-OMe modified nucleotides.

[0304] In one embodiment, k is 1 and 1 is 0, or k is 0 and 1 is 1, or both k and l are 1.

[0305] The antisense strand can therefore be represented by the following formulas:

5′n_{q′}-Nₐ′—Z′Z′Z′—N_{b}′—Y′Y′Y′—Nₐ′-n_{p′}3′ (IIb);

5′n_{q′}-Nₐ′—Y′Y′Y′—N_{b}′—X′X′X′-n_{p′}3′ (IIc); or

5′n_{q′}-Nₐ′—Z′Z′Z′—N_{b}′—Y′Y′Y′—N_{b}′—X′X′X′—Nₐ′-n_{p′}3′ (IId).

[0306] When the antisense strand is represented by formula (IIb), N_{b}′ represents an oligonucleotide sequence comprising 0-10, 0-7, 0-10, 0-7, 0-5, 0-4, 0-2 or 0 modified nucleotides. Each Nₐ′ independently represents an oligonucleotide sequence comprising 2-20, 2-15, or 2-10 modified nucleotides.

[0307] When the antisense strand is represented as formula (IIc), N_{b}′ represents an oligonucleotide sequence comprising 0-10, 0-7, 0-10, 0-7, 0-5, 0-4, 0-2 or 0 modified nucleotides. Each Nₐ′ independently represents an oligonucleotide sequence comprising 2-20, 2-15, or 2-10 modified nucleotides.

[0308] When the antisense strand is represented as formula (IId), each N_{b}′ independently represents an oligonucleotide sequence comprising 0-10, 0-7, 0-10, 0-7, 0-5, 0-4, 0-2 or 0 modified nucleotides. Each Nₐ′ independently represents an oligonucleotide sequence comprising 2-20, 2-15, or 2-10 modified nucleotides. Preferably, N_{b} is 0, 1, 2, 3, 4, 5 or 6.

[0309] In other embodiments, k is 0 and 1 is 0 and the antisense strand may be represented by the formula:

5′n_{p′}-N_{a′}—Y′Y′Y′—N_{a′}-n_{q′}3′ (Ia).

[0310] When the antisense strand is represented as formula (IIa), each Nₐ′ independently represents an oligonucleotide sequence comprising 2-20, 2-15, or 2-10 modified nucleotides.

[0311] Each of X′, Y′ and Z′ may be the same or different from each other.

[0312] Each nucleotide of the sense strand and antisense strand may be independently modified with LNA, HNA, CeNA, 2′-methoxyethyl, 2′-O-methyl, 2′-O-allyl, 2′-C-allyl, 2′-hydroxyl, or 2′-fluoro. For example, each nucleotide of the sense strand and antisense strand is independently modified with 2′-O-methyl or 2′-fluoro. Each X, Y, Z, X′, Y′ and Z′, in particular, may represent a 2′-O-methyl modification or a 2′-fluoro modification.

[0313] In one embodiment, the sense strand of the RNAi agent may contain YYY motif occurring at 9, 10 and 11 positions of the strand when the duplex region is 21 nt, the count starting from the 1^{st} nucleotide from the 5′-end, or optionally, the count starting at the 1^{st} paired nucleotide within the duplex region, from the 5′-end; and Y represents 2′-F modification. The sense strand may additionally contain XXX motif or ZZZ motifs as wing modifications at the opposite end of the duplex region; and XXX and ZZZ each independently represents a 2′-OMe modification or 2′-F modification.

[0314] In one embodiment the antisense strand may contain Y′Y′Y′ motif occurring at positions 11, 12, 13 of the strand, the count starting from the 1^{st} nucleotide from the 5′-end, or optionally, the count starting at the 1^{st} paired nucleotide within the duplex region, from the 5′-end; and Y′ represents 2′-O-methyl modification. The antisense strand may additionally contain X′X′X′ motif or Z′Z′Z′ motifs as wing modifications at the opposite end of the duplex region; and X′X′X′ and Z′Z′Z′ each independently represents a 2′-OMe modification or 2′-F modification.

[0315] The sense strand represented by any one of the above formulas (Ia), (Ib), (Ic), and (Id) forms a duplex with a antisense strand being represented by any one of formulas (IIa), (IIb), (IIc), and (IId), respectively.

[0316] Accordingly, the RNAi agents for use in the methods of the invention may comprise a sense strand and an antisense strand, each strand having 14 to 30 nucleotides, the RNAi duplex represented by formula (III):

sense: 5′nₚ-Nₐ—(XXX)ᵢ—N_{b}—YYY—N_{b}—(ZZZ)ⱼ—Nₐ-n_{q}3′

antisense: 3′nₚ′—Nₐ′—(X′X′X′)ₖ—N_{b}′—Y′Y′Y′—N_{b}′—(Z′Z′Z′)ₗ—Nₐ′-n_{q}′5′ (III)

[0317] wherein:

[0318] i, j, k, and l are each independently 0 or 1;

[0319] p, p′, q, and q′ are each independently 0-6;

[0320] each Nₐ and Nₐ independently represents an oligonucleotide sequence comprising 0-25 modified nucleotides, each sequence comprising at least two differently modified nucleotides;

[0321] each N_{b} and N_{b} independently represents an oligonucleotide sequence comprising 0-10 modified nucleotides;

[0322] wherein

[0323] each nₚ′, nₚ, n_{q}′, and n_{q}, each of which may or may not be present, independently represents an overhang nucleotide; and

[0324] XXX, YYY, ZZZ, X′X′X′, Y′Y′Y′, and Z′Z′Z′ each independently represent one motif of three identical modifications on three consecutive nucleotides.

[0325] In one embodiment, i is 0 and j is 0; or i is 1 and j is 0; or i is 0 and j is 1; or both i and j are 0; or both i and j are 1. In another embodiment, k is 0 and 1 is 0; or k is 1 and 1 is 0; k is 0 and l is 1; or both k and l are 0; or both k and l are 1.

[0326] Exemplary combinations of the sense strand and antisense strand forming a RNAi duplex include the formulas below:

5′nₚ-Nₐ—YYY—Nₐ-n_{q}3′

3′nₚ′—Nₐ′—Y′Y′Y′—Nₐ′n_{q}′5′ (IIa)

5′nₚ-Nₐ—YYY—N_{b}—ZZZ—Nₐ-n_{q}3′

3′nₚ′—Nₐ′—Y′Y′Y′—N_{b}′—Z′Z′Z′—Nₐ′n_{q}′5′ (IIb)

5′nₚ-Nₐ—XXX—N_{b}—YYY—Nₐ-n_{q}3′

3′nₚ′—Nₐ′—X′X′X′—N_{b}′—Y′Y′Y′—Nₐ′-n_{q}′5′ (IIc)

5′nₚ-Nₐ—XXX—N_{b}—YYY—N_{b}—ZZZ—Nₐ-n_{q}3′

3′nₚ′—Nₐ′—X′X′X′—N_{b}′—Y′Y′Y′—N_{b}′—Z′Z′Z′—Nₐ-n_{q}′5′ (IId)

[0327] When the RNAi agent is represented by formula (IIIa), each Nₐ independently represents an oligonucleotide sequence comprising 2-20, 2-15, or 2-10 modified nucleotides.

[0328] When the RNAi agent is represented by formula (IIIb), each N_{b} independently represents an oligonucleotide sequence comprising 1-10, 1-7, 1-5 or 1-4 modified nucleotides. Each Nₐ independently represents an oligonucleotide sequence comprising 2-20, 2-15, or 2-10 modified nucleotides.

[0329] When the RNAi agent is represented as formula (IIIc), each N_{b}, N_{b}′ independently represents an oligonucleotide sequence comprising 0-10, 0-7, 0-10, 0-7, 0-5, 0-4, 0-2 or 0 modified nucleotides. Each Nₐ independently represents an oligonucleotide sequence comprising 2-20, 2-15, or 2-10 modified nucleotides.

[0330] When the RNAi agent is represented as formula (IIId), each N_{b}, N_{b}′ independently represents an oligonucleotide sequence comprising 0-10, 0-7, 0-10, 0-7, 0-5, 0-4, 0-2 or 0 modified nucleotides. Each Nₐ, Nₐ′ independently represents an oligonucleotide sequence comprising 2-20, 2-15, or 2-10 modified nucleotides. Each of Nₐ, Nₐ′, N_{b} and N_{b} independently comprises modifications of alternating pattern.

[0331] Each of X, Y and Z in formulas (III), (IIIa), (IIIb), (IIIc), and (IIId) may be the same or different from each other.

[0332] When the RNAi agent is represented by formula (III), (IIIa), (IIIb), (IIIc), and (IIId), at least one of the Y nucleotides may form a base pair with one of the Y′ nucleotides. Alternatively, at least two of the Y nucleotides form base pairs with the corresponding Y′ nucleotides; or all three of the Y nucleotides all form base pairs with the corresponding Y′ nucleotides.

[0333] When the RNAi agent is represented by formula (IIIb) or (IIId), at least one of the Z nucleotides may form a base pair with one of the Z′ nucleotides. Alternatively, at least two of the Z nucleotides form base pairs with the corresponding Z′ nucleotides; or all three of the Z nucleotides all form base pairs with the corresponding Z′ nucleotides.

[0334] When the RNAi agent is represented as formula (IIIc) or (IIId), at least one of the X nucleotides may form a base pair with one of the X′ nucleotides. Alternatively, at least two of the X nucleotides form base pairs with the corresponding X′ nucleotides; or all three of the X nucleotides all form base pairs with the corresponding X′ nucleotides.

[0335] In one embodiment, the modification on the Y nucleotide is different than the modification on the Y′ nucleotide, the modification on the Z nucleotide is different than the modification on the Z′ nucleotide, and/or the modification on the X nucleotide is different than the modification on the X′ nucleotide.

[0336] In one embodiment, when the RNAi agent is represented by formula (IIId), the Nₐ modifications are 2′-O-methyl or 2′-fluoro modifications. In another embodiment, when the RNAi agent is represented by formula (IIId), the Nₐ modifications are 2′-O-methyl or 2′-fluoro modifications and nₚ′>0 and at least one nₚ′ is linked to a neighboring nucleotide a via phosphorothioate linkage. In yet another embodiment, when the RNAi agent is represented by formula (IIId), the Nₐ modifications are 2′-O-methyl or 2′-fluoro modifications, nₚ′>0 and at least one nₚ′ is linked to a neighboring nucleotide via phosphorothioate linkage, and the sense strand is conjugated to one or more GalNAc derivatives attached through a bivalent or trivalent branched linker (described below). In another embodiment, when the RNAi agent is represented by formula (IIId), the Nₐ modifications are 2′-O-methyl or 2′-fluoro modifications, nₚ′>0 and at least one nₚ′ is linked to a neighboring nucleotide via phosphorothioate linkage, the sense strand comprises at least one phosphorothioate linkage, and the sense strand is conjugated to one or more GalNAc derivatives attached through a bivalent or trivalent branched linker.

[0337] In one embodiment, when the RNAi agent is represented by formula (IIIa), the Nₐ modifications are 2′-O-methyl or 2′-fluoro modifications, nₚ′>0 and at least one nₚ′ is linked to a neighboring nucleotide via phosphorothioate linkage, the sense strand comprises at least one phosphorothioate linkage, and the sense strand is conjugated to one or more GalNAc derivatives attached through a bivalent or trivalent branched linker.

[0338] In one embodiment, the RNAi agent is a multimer containing at least two duplexes represented by formula (III), (IIIa), (IIIb), (IIIc), and (IIId), wherein the duplexes are connected by a linker. The linker can be cleavable or non-cleavable. Optionally, the multimer further comprises a ligand. Each of the duplexes can target the same gene or two different genes; or each of the duplexes can target same gene at two different target sites.

[0339] In one embodiment, the RNAi agent is a multimer containing three, four, five, six or more duplexes represented by formula (III), (IIIa), (IIIb), (IIIc), and (IIId), wherein the duplexes are connected by a linker. The linker can be cleavable or non-cleavable.

[0340] Optionally, the multimer further comprises a ligand. Each of the duplexes can target the same gene or two different genes; or each of the duplexes can target same gene at two different target sites.

[0341] In one embodiment, two RNAi agents represented by formula (III), (IIIa), (IIIb), (IIIc), and (IIId) are linked to each other at the 5′ end, and one or both of the 3′ ends and are optionally conjugated to a ligand. Each of the agents can target the same gene or two different genes; or each of the agents can target same gene at two different target sites. Various publications describe multimeric RNAi agents that can be used in the methods of the invention. Such publications include WO2007/091269, U.S. Pat. No. 7,858,769, WO2010/141511, WO2007/117686, WO2009/014887 and WO2011/031520 the entire contents of each of which are hereby incorporated herein by reference.

[0342] As described in more detail below, the RNAi agent that contains conjugations of one or more carbohydrate moieties to a RNAi agent can optimize one or more properties of the RNAi agent. In many cases, the carbohydrate moiety will be attached to a modified subunit of the RNAi agent. For example, the ribose sugar of one or more ribonucleotide subunits of a dsRNA agent can be replaced with another moiety, e.g., a non-carbohydrate (preferably cyclic) carrier to which is attached a carbohydrate ligand. A ribonucleotide subunit in which the ribose sugar of the subunit has been so replaced is referred to herein as a ribose replacement modification subunit (RRMS). A cyclic carrier may be a carbocyclic ring system, i.e., all ring atoms are carbon atoms, or a heterocyclic ring system, i.e., one or more ring atoms may be a heteroatom, e.g., nitrogen, oxygen, sulfur. The cyclic carrier may be a monocyclic ring system, or may contain two or more rings, e.g. fused rings. The cyclic carrier may be a fully saturated ring system, or it may contain one or more double bonds.

[0343] The ligand may be attached to the polynucleotide via a carrier. The carriers include (i) at least one “backbone attachment point,” preferably two “backbone attachment points” and (ii) at least one “tethering attachment point.” A “backbone attachment point” as used herein refers to a functional group, e.g. a hydroxyl group, or generally, a bond available for, and that is suitable for incorporation of the carrier into the backbone, e.g., the phosphate, or modified phosphate, e.g., sulfur containing, backbone, of a ribonucleic acid. A “tethering attachment point” (TAP) in some embodiments refers to a constituent ring atom of the cyclic carrier, e.g., a carbon atom or a heteroatom (distinct from an atom which provides a backbone attachment point), that connects a selected moiety. The moiety can be, e.g., a carbohydrate, e.g. monosaccharide, disaccharide, trisaccharide, tetrasaccharide, oligosaccharide and polysaccharide. Optionally, the selected moiety is connected by an intervening tether to the cyclic carrier. Thus, the cyclic carrier will often include a functional group, e.g., an amino group, or generally, provide a bond, that is suitable for incorporation or tethering of another chemical entity, e.g., a ligand to the constituent ring.

[0344] The RNAi agents may be conjugated to a ligand via a carrier, wherein the carrier can be cyclic group or acyclic group; preferably, the cyclic group is selected from pyrrolidinyl, pyrazolinyl, pyrazolidinyl, imidazolinyl, imidazolidinyl, piperidinyl, piperazinyl, [1,3]dioxolane, oxazolidinyl, isoxazolidinyl, morpholinyl, thiazolidinyl, isothiazolidinyl, quinoxalinyl, pyridazinonyl, tetrahydrofuryl and decalin; preferably, the acyclic group is selected from serinol backbone or diethanolamine backbone.

[0345] In certain specific embodiments, the RNAi agent for use in the methods of the invention is an agent selected from the group of agents listed in any one of Tables 3, 4, 5, 6, 18, 19, 20, 21, and 23. These agents may further comprise a ligand.

### IV. iRNAs Conjugated to Ligands

[0346] Another modification of the RNA of an iRNA of the invention involves chemically linking to the RNA one or more ligands, moieties or conjugates that enhance the activity, cellular distribution or cellular uptake of the iRNA. Such moieties include but are not limited to lipid moieties such as a cholesterol moiety (Letsinger et al., Proc. Natl. Acid. Sci. USA, 1989, 86: 6553-6556), cholic acid (Manoharan et al., Biorg. Med. Chem. Let., 1994, 4:1053-1060), a thioether, e.g., beryl-S-tritylthiol (Manoharan et al., Ann. N.Y. Acad. Sci., 1992, 660:306-309; Manoharan et al., Biorg. Med. Chem. Let., 1993, 3:2765-2770), a thiocholesterol (Oberhauser et al., Nucl. Acids Res., 1992, 20:533-538), an aliphatic chain, e.g., dodecandiol or undecyl residues (Saison-Behmoaras et al., EMBO J, 1991, 10:1111-1118; Kabanov et al., FEBS Lett., 1990, 259:327-330; Svinarchuk et al., Biochimie, 1993, 75:49-54), a phospholipid, e.g., di-hexadecyl-rac-glycerol or triethyl-ammonium 1,2-di-O-hexadecyl-rac-glycero-3-phosphonate (Manoharan et al., Tetrahedron Lett., 1995, 36:3651-3654; Shea et al., Nucl. Acids Res., 1990, 18:3777-3783), a polyamine or a polyethylene glycol chain (Manoharan et al., Nucleosides & Nucleotides, 1995, 14:969-973), or adamantane acetic acid (Manoharan et al., Tetrahedron Lett., 1995, 36:3651-3654), a palmityl moiety (Mishra et al., Biochim. Biophys. Acta, 1995, 1264:229-237), or an octadecylamine or hexylamino-carbonyloxycholesterol moiety (Crooke et al., J. Pharmacol. Exp. Ther., 1996, 277:923-937).

[0347] In one embodiment, a ligand alters the distribution, targeting or lifetime of an iRNA agent into which it is incorporated. In preferred embodiments a ligand provides an enhanced affinity for a selected target, e.g., molecule, cell or cell type, compartment, e.g., a cellular or organ compartment, tissue, organ or region of the body, as, e.g., compared to a species absent such a ligand. Preferred ligands will not take part in duplex pairing in a duplexed nucleic acid.

[0348] Ligands can include a naturally occurring substance, such as a protein (e.g., human serum albumin (HSA), low-density lipoprotein (LDL), or globulin); carbohydrate (e.g., a dextran, pullulan, chitin, chitosan, inulin, cyclodextrin, N-acetylgalactosamine, or hyaluronic acid); or a lipid. The ligand can also be a recombinant or synthetic molecule, such as a synthetic polymer, e.g., a synthetic polyamino acid. Examples of polyamino acids include polyamino acid is a polylysine (PLL), poly L-aspartic acid, poly L-glutamic acid, styrene-maleic acid anhydride copolymer, poly(L-lactide-co-glycolied) copolymer, divinyl ether-maleic anhydride copolymer, N-(2-hydroxypropyl)methacrylamide copolymer (HMPA), polyethylene glycol (PEG), polyvinyl alcohol (PVA), polyurethane, poly(2-ethylacryllic acid), N-isopropylacrylamide polymers, or polyphosphazine. Example of polyamines include: polyethylenimine, polylysine (PLL), spermine, spermidine, polyamine, pseudopeptide-polyamine, peptidomimetic polyamine, dendrimer polyamine, arginine, amidine, protamine, cationic lipid, cationic porphyrin, quaternary salt of a polyamine, or an alpha helical peptide.

[0349] Ligands can also include targeting groups, e.g., a cell or tissue targeting agent, e.g., a lectin, glycoprotein, lipid or protein, e.g., an antibody, that binds to a specified cell type such as a kidney cell. A targeting group can be a thyrotropin, melanotropin, lectin, glycoprotein, surfactant protein A, Mucin carbohydrate, multivalent lactose, multivalent galactose, N-acetyl-galactosamine, N-acetyl-gulucoseamine multivalent mannose, multivalent fucose, glycosylated polyaminoacids, multivalent galactose, transferrin, bisphosphonate, polyglutamate, polyaspartate, a lipid, cholesterol, a steroid, bile acid, folate, vitamin B12, vitamin A, biotin, or an RGD peptide or RGD peptide mimetic.

[0350] Other examples of ligands include dyes, intercalating agents (e.g. acridines), cross-linkers (e.g. psoralene, mitomycin C), porphyrins (TPPC4, texaphyrin, Sapphyrin), polycyclic aromatic hydrocarbons (e.g., phenazine, dihydrophenazine), artificial endonucleases (e.g. EDTA), lipophilic molecules, e.g., cholesterol, cholic acid, adamantane acetic acid, 1-pyrene butyric acid, dihydrotestosterone, 1,3-Bis-O(hexadecyl)glycerol, geranyloxyhexyl group, hexadecylglycerol, borneol, menthol, 1,3-propanediol, heptadecyl group, palmitic acid, myristic acid,O3-(oleoyl)lithocholic acid, O3-(oleoyl)cholenic acid, dimethoxytrityl, or phenoxazine) and peptide conjugates (e.g., antennapedia peptide, Tat peptide), alkylating agents, phosphate, amino, mercapto, PEG (e.g., PEG-40K), MPEG, [MPEG]₂, polyamino, alkyl, substituted alkyl, radiolabeled markers, enzymes, haptens (e.g. biotin), transport/absorption facilitators (e.g., aspirin, vitamin E, folic acid), synthetic ribonucleases (e.g., imidazole, bisimidazole, histamine, imidazole clusters, acridine-imidazole conjugates, Eu3+ complexes of tetraazamacrocycles), dinitrophenyl, HRP, or AP.

[0351] Ligands can be proteins, e.g., glycoproteins, or peptides, e.g., molecules having a specific affinity for a co-ligand, or antibodies e.g., an antibody, that binds to a specified cell type such as a hepatic cell. Ligands can also include hormones and hormone receptors. They can also include non-peptidic species, such as lipids, lectins, carbohydrates, vitamins, cofactors, multivalent lactose, multivalent galactose, N-acetyl-galactosamine, N-acetyl-gulucosamine multivalent mannose, or multivalent fucose. The ligand can be, for example, a lipopolysaccharide, an activator of p38 MAP kinase, or an activator of NF-κB.

[0352] The ligand can be a substance, e.g., a drug, which can increase the uptake of the iRNA agent into the cell, for example, by disrupting the cell's cytoskeleton, e.g., by disrupting the cell's microtubules, microfilaments, and/or intermediate filaments. The drug can be, for example, taxon, vincristine, vinblastine, cytochalasin, nocodazole, japlakinolide, latrunculin A, phalloidin, swinholide A, indanocine, or myoservin.

[0353] In some embodiments, a ligand attached to an iRNA as described herein acts as a pharmacokinetic modulator (PK modulator). PK modulators include lipophiles, bile acids, steroids, phospholipid analogues, peptides, protein binding agents, PEG, vitamins etc.

[0354] Exemplary PK modulators include, but are not limited to, cholesterol, fatty acids, cholic acid, lithocholic acid, dialkylglycerides, diacylglyceride, phospholipids, sphingolipids, naproxen, ibuprofen, vitamin E, biotin etc. Oligonucleotides that comprise a number of phosphorothioate linkages are also known to bind to serum protein, thus short oligonucleotides, e.g., oligonucleotides of about 5 bases, 10 bases, 15 bases or 20 bases, comprising multiple of phosphorothioate linkages in the backbone are also amenable to the present invention as ligands (e.g. as PK modulating ligands). In addition, aptamers that bind serum components (e.g. serum proteins) are also suitable for use as PK modulating ligands in the embodiments described herein.

[0355] Ligand-conjugated oligonucleotides of the invention may be synthesized by the use of an oligonucleotide that bears a pendant reactive functionality, such as that derived from the attachment of a linking molecule onto the oligonucleotide (described below). This reactive oligonucleotide may be reacted directly with commercially-available ligands, ligands that are synthesized bearing any of a variety of protecting groups, or ligands that have a linking moiety attached thereto.

[0356] The oligonucleotides used in the conjugates of the present invention may be conveniently and routinely made through the well-known technique of solid-phase synthesis. Equipment for such synthesis is sold by several vendors including, for example, Applied Biosystems (Foster City, Calif.). Any other means for such synthesis known in the art may additionally or alternatively be employed. It is also known to use similar techniques to prepare other oligonucleotides, such as the phosphorothioates and alkylated derivatives.

[0357] In the ligand-conjugated oligonucleotides and ligand-molecule bearing sequence-specific linked nucleosides of the present invention, the oligonucleotides and oligonucleosides may be assembled on a suitable DNA synthesizer utilizing standard nucleotide or nucleoside precursors, or nucleotide or nucleoside conjugate precursors that already bear the linking moiety, ligand-nucleotide or nucleoside-conjugate precursors that already bear the ligand molecule, or non-nucleoside ligand-bearing building blocks.

[0358] When using nucleotide-conjugate precursors that already bear a linking moiety, the synthesis of the sequence-specific linked nucleosides is typically completed, and the ligand molecule is then reacted with the linking moiety to form the ligand-conjugated oligonucleotide. In some embodiments, the oligonucleotides or linked nucleosides of the present invention are synthesized by an automated synthesizer using phosphoramidites derived from ligand-nucleoside conjugates in addition to the standard phosphoramidites and non-standard phosphoramidites that are commercially available and routinely used in oligonucleotide synthesis.

[0359] A. Lipid Conjugates

[0360] In one embodiment, the ligand or conjugate is a lipid or lipid-based molecule. Such a lipid or lipid-based molecule preferably binds a serum protein, e.g., human serum albumin (HSA). An HSA binding ligand allows for distribution of the conjugate to a target tissue, e.g., a non-kidney target tissue of the body. For example, the target tissue can be the liver, including parenchymal cells of the liver. Other molecules that can bind HSA can also be used as ligands. For example, naproxen or aspirin can be used. A lipid or lipid-based ligand can (a) increase resistance to degradation of the conjugate, (b) increase targeting or transport into a target cell or cell membrane, and/or (c) can be used to adjust binding to a serum protein, e.g., HSA.

[0361] A lipid based ligand can be used to inhibit, e.g., control the binding of the conjugate to a target tissue. For example, a lipid or lipid-based ligand that binds to HSA more strongly will be less likely to be targeted to the kidney and therefore less likely to be cleared from the body. A lipid or lipid-based ligand that binds to HSA less strongly can be used to target the conjugate to the kidney.

[0362] In a preferred embodiment, the lipid based ligand binds HSA. Preferably, it binds HSA with a sufficient affinity such that the conjugate will be preferably distributed to a non-kidney tissue. However, it is preferred that the affinity not be so strong that the HSA-ligand binding cannot be reversed.

[0363] In another preferred embodiment, the lipid based ligand binds HSA weakly or not at all, such that the conjugate will be preferably distributed to the kidney. Other moieties that target to kidney cells can also be used in place of or in addition to the lipid based ligand. In another aspect, the ligand is a moiety, e.g., a vitamin, which is taken up by a target cell, e.g., a proliferating cell. These are particularly useful for treating disorders characterized by unwanted cell proliferation, e.g., of the malignant or non-malignant type, e.g., cancer cells. Exemplary vitamins include vitamin A, E, and K. Other exemplary vitamins include are B vitamin, e.g., folic acid, B12, riboflavin, biotin, pyridoxal or other vitamins or nutrients taken up by target cells such as liver cells. Also included are HSA and low density lipoprotein (LDL).

[0364] B. Cell Permeation Agents

[0365] In another aspect, the ligand is a cell-permeation agent, preferably a helical cell-permeation agent. Preferably, the agent is amphipathic. An exemplary agent is a peptide such as tat or antennopedia. If the agent is a peptide, it can be modified, including a peptidylmimetic, invertomers, non-peptide or pseudo-peptide linkages, and use of D-amino acids. The helical agent is preferably an alpha-helical agent, which preferably has a lipophilic and a lipophobic phase.

[0366] The ligand can be a peptide or peptidomimetic. A peptidomimetic (also referred to herein as an oligopeptidomimetic) is a molecule capable of folding into a defined three-dimensional structure similar to a natural peptide. The attachment of peptide and peptidomimetics to iRNA agents can affect pharmacokinetic distribution of the iRNA, such as by enhancing cellular recognition and absorption. The peptide or peptidomimetic moiety can be about 5-50 amino acids long, e.g., about 5, 10, 15, 20, 25, 30, 35, 40, 45, or 50 amino acids long.

[0367] A peptide or peptidomimetic can be, for example, a cell permeation peptide, cationic peptide, amphipathic peptide, or hydrophobic peptide (e.g., consisting primarily of Tyr, Trp or Phe). The peptide moiety can be a dendrimer peptide, constrained peptide or crosslinked peptide. In another alternative, the peptide moiety can include a hydrophobic membrane translocation sequence (MTS). An exemplary hydrophobic MTS-containing peptide is RFGF having the amino acid sequence AAVALLPAVLLALLAP (SEQ ID NO: 9). An RFGF analogue (e.g., amino acid sequence AALLPVLLAAP (SEQ ID NO: 10) containing a hydrophobic MTS can also be a targeting moiety. The peptide moiety can be a “delivery” peptide, which can carry large polar molecules including peptides, oligonucleotides, and protein across cell membranes. For example, sequences from the HIV Tat protein (GRKKRRQRRRPPQ (SEQ ID NO: 11) and the Drosophila Antennapedia protein (RQIKIWFQNRRMKWKK (SEQ ID NO: 12) have been found to be capable of functioning as delivery peptides. A peptide or peptidomimetic can be encoded by a random sequence of DNA, such as a peptide identified from a phage-display library, or one-bead-one-compound (OBOC) combinatorial library (Lam et al., Nature, 354:82-84, 1991). Examples of a peptide or peptidomimetic tethered to a dsRNA agent via an incorporated monomer unit for cell targeting purposes is an arginine-glycine-aspartic acid (RGD)-peptide, or RGD mimic. A peptide moiety can range in length from about 5 amino acids to about 40 amino acids. The peptide moieties can have a structural modification, such as to increase stability or direct conformational properties. Any of the structural modifications described below can be utilized.

[0368] An RGD peptide for use in the compositions and methods of the invention may be linear or cyclic, and may be modified, e.g., glycosylated or methylated, to facilitate targeting to a specific tissue(s). RGD-containing peptides and peptidiomimemtics may include D-amino acids, as well as synthetic RGD mimics. In addition to RGD, one can use other moieties that target the integrin ligand. Preferred conjugates of this ligand target PECAM-1 or VEGF.

[0369] A “cell permeation peptide” is capable of permeating a cell, e.g., a microbial cell, such as a bacterial or fungal cell, or a mammalian cell, such as a human cell. A microbial cell-permeating peptide can be, for example, a α-helical linear peptide (e.g., LL-37 or Ceropin P1), a disulfide bond-containing peptide (e.g., α-defensin, β-defensin or bactenecin), or a peptide containing only one or two dominating amino acids (e.g., PR-39 or indolicidin). A cell permeation peptide can also include a nuclear localization signal (NLS). For example, a cell permeation peptide can be a bipartite amphipathic peptide, such as MPG, which is derived from the fusion peptide domain of HIV-1 gp41 and the NLS of SV40 large T antigen (Simeoni et al., Nucl. Acids Res. 31:2717-2724, 2003).

[0370] C. Carbohydrate Conjugates

[0371] In some embodiments of the compositions and methods of the invention, an iRNA oligonucleotide further comprises a carbohydrate. The carbohydrate conjugated iRNA are advantageous for the in vivo delivery of nucleic acids, as well as compositions suitable for in vivo therapeutic use, as described herein. As used herein, “carbohydrate” refers to a compound which is either a carbohydrate per se made up of one or more monosaccharide units having at least 6 carbon atoms (which can be linear, branched or cyclic) with an oxygen, nitrogen or sulfur atom bonded to each carbon atom; or a compound having as a part thereof a carbohydrate moiety made up of one or more monosaccharide units each having at least six carbon atoms (which can be linear, branched or cyclic), with an oxygen, nitrogen or sulfur atom bonded to each carbon atom. Representative carbohydrates include the sugars (mono-, di-, tri- and oligosaccharides containing from about 4, 5, 6, 7, 8, or 9 monosaccharide units), and polysaccharides such as starches, glycogen, cellulose and polysaccharide gums. Specific monosaccharides include C5 and above (e.g., C5, C6, C7, or C8) sugars; di- and trisaccharides include sugars having two or three monosaccharide units (e.g., C5, C6, C7, or C8).

[0372] In one embodiment, a carbohydrate conjugate for use in the compositions and methods of the invention is a monosaccharide. In another embodiment, a carbohydrate conjugate for use in the compositions and methods of the invention is selected from the group consisting of:

[chemical structure]

[chemical structure]

[chemical structure]

[0373] In one embodiment, the monosaccharide is an N-acetylgalactosamine, such as

[chemical structure]

[0374] Another representative carbohydrate conjugate for use in the embodiments described herein includes, but is not limited to,

[chemical structure]

[0375] (Formula XXIII), when one of X or Y is an oligonucleotide, the other is a hydrogen.

[0376] In certain embodiments of the invention, the GalNAc or GalNAc derivative is attached to an iRNA agent of the invention via a monovalent linker. In some embodiments, the GalNAc or GalNAc derivative is attached to an iRNA agent of the invention via a bivalent linker. In yet other embodiments of the invention, the GalNAc or GalNAc derivative is attached to an iRNA agent of the invention via a trivalent linker.

[0377] In one embodiment, the double stranded RNAi agents of the invention comprise one GalNAc or GalNAc derivative attached to the iRNA agent. In another embodiment, the double stranded RNAi agents of the invention comprise a plurality (e.g., 2, 3, 4, 5, or 6) GalNAc or GalNAc derivatives, each independently attached to a plurality of nucleotides of the double stranded RNAi agent through a plurality of monovalent linkers.

[0378] In some embodiments, for example, when the two strands of an iRNA agent of the invention are part of one larger molecule connected by an uninterrupted chain of nucleotides between the 3′-end of one strand and the 5′-end of the respective other strand forming a hairpin loop comprising, a plurality of unpaired nucleotides, each unpaired nucleotide within the hairpin loop may independently comprise a GalNAc or GalNAc derivative attached via a monovalent linker.

[0379] In some embodiments, the carbohydrate conjugate further comprises one or more additional ligands as described above, such as, but not limited to, a PK modulator and/or a cell permeation peptide.

[0380] D. Linkers

[0381] In some embodiments, the conjugate or ligand described herein can be attached to an iRNA oligonucleotide with various linkers that can be cleavable or non-cleavable.

[0382] The term “linker” or “linking group” means an organic moiety that connects two parts of a compound, e.g., covalently attaches two parts of a compound. Linkers typically comprise a direct bond or an atom such as oxygen or sulfur, a unit such as NR8, C(O), C(O)NH, SO, SO₂, SO₂NH or a chain of atoms, such as, but not limited to, substituted or unsubstituted alkyl, substituted or unsubstituted alkenyl, substituted or unsubstituted alkynyl, arylalkyl, arylalkenyl, arylalkynyl, heteroarylalkyl, heteroarylalkenyl, heteroarylalkynyl, heterocyclylalkyl, heterocyclylalkenyl, heterocyclylalkynyl, aryl, heteroaryl, heterocyclyl, cycloalkyl, cycloalkenyl, alkylarylalkyl, alkylarylalkenyl, alkylarylalkynyl, alkenylarylalkyl, alkenylarylalkenyl, alkenylarylalkynyl, alkynylarylalkyl, alkynylarylalkenyl, alkynylarylalkynyl, alkylheteroarylalkyl, alkylheteroarylalkenyl, alkylheteroarylalkynyl, alkenylheteroarylalkyl, alkenylheteroarylalkenyl, alkenylheteroarylalkynyl, alkynylheteroarylalkyl, alkynylheteroarylalkenyl, alkynylheteroarylalkynyl, alkylheterocyclylalkyl, alkylheterocyclylalkenyl, alkylhererocyclylalkynyl, alkenylheterocyclylalkyl, alkenylheterocyclylalkenyl, alkenylheterocyclylalkynyl, alkynylheterocyclylalkyl, alkynylheterocyclylalkenyl, alkynylheterocyclylalkynyl, alkylaryl, alkenylaryl, alkynylaryl, alkylheteroaryl, alkenylheteroaryl, alkynylhereroaryl, which one or more methylenes can be interrupted or terminated by O, S, S(O), SO₂, N(R8), C(O), substituted or unsubstituted aryl, substituted or unsubstituted heteroaryl, substituted or unsubstituted heterocyclic; where R8 is hydrogen, acyl, aliphatic or substituted aliphatic. In one embodiment, the linker is between about 1-24 atoms, 2-24, 3-24, 4-24, 5-24, 6-24, 6-18, 7-18, 8-18 atoms, 7-17, 8-17, 6-16, 7-16, or 8-16 atoms.

[0383] A cleavable linking group is one which is sufficiently stable outside the cell, but which upon entry into a target cell is cleaved to release the two parts the linker is holding together. In a preferred embodiment, the cleavable linking group is cleaved at least about 10 times, 20, times, 30 times, 40 times, 50 times, 60 times, 70 times, 80 times, 90 times or more, or at least about 100 times faster in a target cell or under a first reference condition (which can, e.g., be selected to mimic or represent intracellular conditions) than in the blood of a subject, or under a second reference condition (which can, e.g., be selected to mimic or represent conditions found in the blood or serum).

[0384] Cleavable linking groups are susceptible to cleavage agents, e.g., pH, redox potential or the presence of degradative molecules. Generally, cleavage agents are more prevalent or found at higher levels or activities inside cells than in serum or blood. Examples of such degradative agents include: redox agents which are selected for particular substrates or which have no substrate specificity, including, e.g., oxidative or reductive enzymes or reductive agents such as mercaptans, present in cells, that can degrade a redox cleavable linking group by reduction; esterases; endosomes or agents that can create an acidic environment, e.g., those that result in a pH of five or lower; enzymes that can hydrolyze or degrade an acid cleavable linking group by acting as a general acid, peptidases (which can be substrate specific), and phosphatases.

[0385] A cleavable linkage group, such as a disulfide bond can be susceptible to pH. The pH of human serum is 7.4, while the average intracellular pH is slightly lower, ranging from about 7.1-7.3. Endosomes have a more acidic pH, in the range of 5.5-6.0, and lysosomes have an even more acidic pH at around 5.0. Some linkers will have a cleavable linking group that is cleaved at a preferred pH, thereby releasing a cationic lipid from the ligand inside the cell, or into the desired compartment of the cell.

[0386] A linker can include a cleavable linking group that is cleavable by a particular enzyme. The type of cleavable linking group incorporated into a linker can depend on the cell to be targeted. For example, a liver-targeting ligand can be linked to a cationic lipid through a linker that includes an ester group. Liver cells are rich in esterases, and therefore the linker will be cleaved more efficiently in liver cells than in cell types that are not esterase-rich. Other cell-types rich in esterases include cells of the lung, renal cortex, and testis.

[0387] Linkers that contain peptide bonds can be used when targeting cell types rich in peptidases, such as liver cells and synoviocytes.

[0388] In general, the suitability of a candidate cleavable linking group can be evaluated by testing the ability of a degradative agent (or condition) to cleave the candidate linking group. It will also be desirable to also test the candidate cleavable linking group for the ability to resist cleavage in the blood or when in contact with other non-target tissue. Thus, one can determine the relative susceptibility to cleavage between a first and a second condition, where the first is selected to be indicative of cleavage in a target cell and the second is selected to be indicative of cleavage in other tissues or biological fluids, e.g., blood or serum. The evaluations can be carried out in cell free systems, in cells, in cell culture, in organ or tissue culture, or in whole animals. It can be useful to make initial evaluations in cell-free or culture conditions and to confirm by further evaluations in whole animals. In preferred embodiments, useful candidate compounds are cleaved at least about 2, 4, 10, 20, 30, 40, 50, 60, 70, 80, 90, or about 100 times faster in the cell (or under in vitro conditions selected to mimic intracellular conditions) as compared to blood or serum (or under in vitro conditions selected to mimic extracellular conditions).

[0389] i. Redox Cleavable Linking Groups

[0390] In one embodiment, a cleavable linking group is a redox cleavable linking group that is cleaved upon reduction or oxidation. An example of reductively cleavable linking group is a disulphide linking group (—S—S—). To determine if a candidate cleavable linking group is a suitable “reductively cleavable linking group,” or for example is suitable for use with a particular iRNA moiety and particular targeting agent one can look to methods described herein. For example, a candidate can be evaluated by incubation with dithiothreitol (DTT), or other reducing agent using reagents know in the art, which mimic the rate of cleavage which would be observed in a cell, e.g., a target cell. The candidates can also be evaluated under conditions which are selected to mimic blood or serum conditions. In one, candidate compounds are cleaved by at most about 10% in the blood. In other embodiments, useful candidate compounds are degraded at least about 2, 4, 10, 20, 30, 40, 50, 60, 70, 80, 90, or about 100 times faster in the cell (or under in vitro conditions selected to mimic intracellular conditions) as compared to blood (or under in vitro conditions selected to mimic extracellular conditions). The rate of cleavage of candidate compounds can be determined using standard enzyme kinetics assays under conditions chosen to mimic intracellular media and compared to conditions chosen to mimic extracellular media.

[0391] ii. Phosphate-Based Cleavable Linking Groups

[0392] In another embodiment, a cleavable linker comprises a phosphate-based cleavable linking group. A phosphate-based cleavable linking group is cleaved by agents that degrade or hydrolyze the phosphate group. An example of an agent that cleaves phosphate groups in cells are enzymes such as phosphatases in cells. Examples of phosphate-based linking groups are —O—P(O)(ORk)-O—, —O—P(S)(ORk)-O—, —O—P(S)(SRk)-O—, —S—P(O)(ORk)-O—, —O—P(O)(ORk)-S—, —S—P(O)(ORk)-S—, —O—P(S)(ORk)-S—, —S—P(S)(ORk)-O—, —O—P(O)(Rk)-O—, —O—P(S)(Rk)-O—, —S—P(O)(Rk)-O—, —S—P(S)(Rk)-O—, —S—P(O)(Rk)-S—, —O—P(S)(Rk)-S—. Preferred embodiments are —O—P(O)(OH)—O—, —O—P(S)(OH)—O—, —O—P(S)(SH)—O—, —S—P(O)(OH)—O—, —O—P(O)(OH)—S—, —S—P(O)(OH)—S—, —O—P(S)(OH)—S—, —S—P(S)(OH)—O—, —O—P(O)(H)—O—, —O—P(S)(H)—O—, —S—P(O)(H)—O, —S—P(S)(H)—O—, —S—P(O)(H)—S—, —O—P(S)(H)—S—. A preferred embodiment is —O—P(O)(OH)—O—. These candidates can be evaluated using methods analogous to those described above.

[0393] iii. Acid Cleavable Linking Groups

[0394] In another embodiment, a cleavable linker comprises an acid cleavable linking group. An acid cleavable linking group is a linking group that is cleaved under acidic conditions. In preferred embodiments acid cleavable linking groups are cleaved in an acidic environment with a pH of about 6.5 or lower (e.g., about 6.0, 5.75, 5.5, 5.25, 5.0, or lower), or by agents such as enzymes that can act as a general acid. In a cell, specific low pH organelles, such as endosomes and lysosomes can provide a cleaving environment for acid cleavable linking groups. Examples of acid cleavable linking groups include but are not limited to hydrazones, esters, and esters of amino acids. Acid cleavable groups can have the general formula —C═NN—, C(O)O, or —OC(O). A preferred embodiment is when the carbon attached to the oxygen of the ester (the alkoxy group) is an aryl group, substituted alkyl group, or tertiary alkyl group such as dimethyl pentyl or t-butyl. These candidates can be evaluated using methods analogous to those described above.

[0395] iv. Ester-Based Linking Groups

[0396] In another embodiment, a cleavable linker comprises an ester-based cleavable linking group. An ester-based cleavable linking group is cleaved by enzymes such as esterases and amidases in cells. Examples of ester-based cleavable linking groups include but are not limited to esters of alkylene, alkenylene and alkynylene groups. Ester cleavable linking groups have the general formula —C(O)O—, or —OC(O)—. These candidates can be evaluated using methods analogous to those described above.

[0397] v. Peptide-Based Cleaving Groups

[0398] In yet another embodiment, a cleavable linker comprises a peptide-based cleavable linking group. A peptide-based cleavable linking group is cleaved by enzymes such as peptidases and proteases in cells. Peptide-based cleavable linking groups are peptide bonds formed between amino acids to yield oligopeptides (e.g., dipeptides, tripeptides etc.) and polypeptides. Peptide-based cleavable groups do not include the amide group (—C(O)NH—). The amide group can be formed between any alkylene, alkenylene or alkynelene. A peptide bond is a special type of amide bond formed between amino acids to yield peptides and proteins. The peptide based cleavage group is generally limited to the peptide bond (i.e., the amide bond) formed between amino acids yielding peptides and proteins and does not include the entire amide functional group. Peptide-based cleavable linking groups have the general formula —NHCHRAC(O)NHCHRBC(O)—, where RA and RB are the R groups of the two adjacent amino acids. These candidates can be evaluated using methods analogous to those described above.

[0399] In one embodiment, an iRNA of the invention is conjugated to a carbohydrate through a linker. Non-limiting examples of iRNA carbohydrate conjugates with linkers of the compositions and methods of the invention include, but are not limited to,

[chemical structure]

[chemical structure]

when one of X or Y is an oligonucleotide, the other is a hydrogen.

[0400] In certain embodiments of the compositions and methods of the invention, a ligand is one or more GalNAc (N-acetylgalactosamine) derivatives attached through a bivalent or trivalent branched linker.

[0401] In one embodiment, a dsRNA of the invention is conjugated to a bivalent or trivalent branched linker selected from the group of structures shown in any of formula (XXXII)-(XXXV):

[chemical structure]

wherein:
q2A, q2B, q3A, q3B, q4A, q4B, q5A, q5B and q5C represent independently for each occurrence 0-20 and wherein the repeating unit can be the same or different;
P^{2A}, P^{2B}, P^{3A}, P^{3B}, P^{4A}, P^{4B}, P^{5A}, P^{5B}, P^{5C}, T^{2A}, T^{2B}, T^{3A}, T^{3B}, T^{4A}, T^{4B}, T^{4A}, T^{5B}, T^{5C} are each independently for each occurrence absent, CO, NH, O, S, OC(O), NHC(O), CH₂, CH₂NH or CH₂O;
Q^{2A}, Q^{2B}, Q^{3A}, Q^{3B}, Q^{4A}, Q^{4B}, Q^{5A}, Q^{5B}, Q^{5C} are independently for each occurrence absent, alkylene, substituted alkylene wherein one or more methylenes can be interrupted or terminated by one or more of O, S, S(O), SO₂, N(R^{N}), C(R′)═C(R″), CC or C(O);
R^{2A}, R^{2B}, R^{3A}, R^{3B}, R^{4A}, R^{4B}, R^{5A}, R^{5B}, R^{5C} are each independently for each occurrence absent, NH, O, S, CH₂, C(O)O, C(O)NH, NHCH(R^{a})C(O), —C(O)—CH(R^{a})—NH—, CO, CH═N—

[chemical structure]

or heterocyclyl;

[0402] L^{2A}, L^{2B}, L^{3A}, L^{3B}, L^{4A}, L^{4B}, L^{5A}, L^{5B} and L^{5C} represent the ligand; i.e. each independently for each occurrence a monosaccharide (such as GalNAc), disaccharide, trisaccharide, tetrasaccharide, oligosaccharide, or polysaccharide; and R^{a} is H or amino acid side chain. Trivalent conjugating GalNAc derivatives are particularly useful for use with RNAi agents for inhibiting the expression of a target gene, such as those of formula (XXXVI):

[chemical structure]

[0403] wherein L^{5A}, L^{5B} and L^{5C} represent a monosaccharide, such as GalNAc derivative.

[0404] Examples of suitable bivalent and trivalent branched linker groups conjugating GalNAc derivatives include, but are not limited to, the structures recited above as formulas II, VII, XI, X, and XIII.

[0405] Representative U.S. patents that teach the preparation of RNA conjugates include, but are not limited to, U.S. Pat. Nos. 4,828,979; 4,948,882; 5,218,105; 5,525,465; 5,541,313; 5,545,730; 5,552,538; 5,578,717, 5,580,731; 5,591,584; 5,109,124; 5,118,802; 5,138,045; 5,414,077; 5,486,603; 5,512,439; 5,578,718; 5,608,046; 4,587,044; 4,605,735; 4,667,025; 4,762,779; 4,789,737; 4,824,941; 4,835,263; 4,876,335; 4,904,582; 4,958,013; 5,082,830; 5,112,963; 5,214,136; 5,082,830; 5,112,963; 5,214,136; 5,245,022; 5,254,469; 5,258,506; 5,262,536; 5,272,250; 5,292,873; 5,317,098; 5,371,241, 5,391,723; 5,416,203, 5,451,463; 5,510,475; 5,512,667; 5,514,785; 5,565,552; 5,567,810; 5,574,142; 5,585,481; 5,587,371; 5,595,726; 5,597,696; 5,599,923; 5,599,928 and 5,688,941; 6,294,664; 6,320,017; 6,576,752; 6,783,931; 6,900,297; 7,037,646; 8,106,022, the entire contents of each of which are hereby incorporated herein by reference.

[0406] It is not necessary for all positions in a given compound to be uniformly modified, and in fact more than one of the aforementioned modifications can be incorporated in a single compound or even at a single nucleoside within an iRNA. The present invention also includes iRNA compounds that are chimeric compounds.

[0407] “Chimeric” iRNA compounds or “chimeras,” in the context of this invention, are iRNA compounds, preferably dsRNAs, which contain two or more chemically distinct regions, each made up of at least one monomer unit, i.e., a nucleotide in the case of a dsRNA compound. These iRNAs typically contain at least one region wherein the RNA is modified so as to confer upon the iRNA increased resistance to nuclease degradation, increased cellular uptake, and/or increased binding affinity for the target nucleic acid. An additional region of the iRNA can serve as a substrate for enzymes capable of cleaving RNA:DNA or RNA:RNA hybrids. By way of example, RNase H is a cellular endonuclease which cleaves the RNA strand of an RNA:DNA duplex. Activation of RNase H, therefore, results in cleavage of the RNA target, thereby greatly enhancing the efficiency of iRNA inhibition of gene expression. Consequently, comparable results can often be obtained with shorter iRNAs when chimeric dsRNAs are used, compared to phosphorothioate deoxy dsRNAs hybridizing to the same target region. Cleavage of the RNA target can be routinely detected by gel electrophoresis and, if necessary, associated nucleic acid hybridization techniques known in the art.

[0408] In certain instances, the RNA of an iRNA can be modified by a non-ligand group. A number of non-ligand molecules have been conjugated to iRNAs in order to enhance the activity, cellular distribution or cellular uptake of the iRNA, and procedures for performing such conjugations are available in the scientific literature. Such non-ligand moieties have included lipid moieties, such as cholesterol (Kubo, T. et al., Biochem. Biophys. Res. Comm., 2007, 365(1):54-61; Letsinger et al., Proc. Natl. Acad. Sci. USA, 1989, 86:6553), cholic acid (Manoharan et al., Bioorg. Med. Chem. Lett., 1994, 4:1053), a thioether, e.g., hexyl-S-tritylthiol (Manoharan et al., Ann. N.Y. Acad. Sci., 1992, 660:306; Manoharan et al., Bioorg. Med. Chem. Let., 1993, 3:2765), a thiocholesterol (Oberhauser et al., Nucl. Acids Res., 1992, 20:533), an aliphatic chain, e.g., dodecandiol or undecyl residues (Saison-Behmoaras et al., EMBO J., 1991, 10:111; Kabanov et al., FEBS Lett., 1990, 259:327; Svinarchuk et al., Biochimie, 1993, 75:49), a phospholipid, e.g., di-hexadecyl-rac-glycerol or triethylammonium 1,2-di-O-hexadecyl-rac-glycero-3-H-phosphonate (Manoharan et al., Tetrahedron Lett., 1995, 36:3651; Shea et al., Nucl. Acids Res., 1990, 18:3777), a polyamine or a polyethylene glycol chain (Manoharan et al., Nucleosides & Nucleotides, 1995, 14:969), or adamantane acetic acid (Manoharan et al., Tetrahedron Lett., 1995, 36:3651), a palmityl moiety (Mishra et al., Biochim. Biophys. Acta, 1995, 1264:229), or an octadecylamine or hexylamino-carbonyl-oxycholesterol moiety (Crooke et al., J. Pharmacol. Exp. Ther., 1996, 277:923). Representative United States patents that teach the preparation of such RNA conjugates have been listed above. Typical conjugation protocols involve the synthesis of an RNAs bearing an aminolinker at one or more positions of the sequence. The amino group is then reacted with the molecule being conjugated using appropriate coupling or activating reagents. The conjugation reaction can be performed either with the RNA still bound to the solid support or following cleavage of the RNA, in solution phase. Purification of the RNA conjugate by HPLC typically affords the pure conjugate.

### IV. Delivery of an iRNA of the Invention

[0409] The delivery of an iRNA of the invention to a cell e.g., a cell within a subject, such as a human subject (e.g., a subject in need thereof, such as a subject having a complement component C5-associated disease) can be achieved in a number of different ways. For example, delivery may be performed by contacting a cell with an iRNA of the invention either in vitro or in vivo. In vivo delivery may also be performed directly by administering a composition comprising an iRNA, e.g., a dsRNA, to a subject. Alternatively, in vivo delivery may be performed indirectly by administering one or more vectors that encode and direct the expression of the iRNA. These alternatives are discussed further below.

[0410] In general, any method of delivering a nucleic acid molecule (in vitro or in vivo) can be adapted for use with an iRNA of the invention (see e.g., Akhtar S. and Julian R L. (1992) Trends Cell. Biol. 2(5):139-144 and WO94/02595, which are incorporated herein by reference in their entireties). For in vivo delivery, factors to consider in order to deliver an iRNA molecule include, for example, biological stability of the delivered molecule, prevention of non-specific effects, and accumulation of the delivered molecule in the target tissue. The non-specific effects of an iRNA can be minimized by local administration, for example, by direct injection or implantation into a tissue or topically administering the preparation. Local administration to a treatment site maximizes local concentration of the agent, limits the exposure of the agent to systemic tissues that can otherwise be harmed by the agent or that can degrade the agent, and permits a lower total dose of the iRNA molecule to be administered. Several studies have shown successful knockdown of gene products when an iRNA is administered locally. For example, intraocular delivery of a VEGF dsRNA by intravitreal injection in cynomolgus monkeys (Tolentino, M J., et al (2004) Retina 24:132-138) and subretinal injections in mice (Reich, S J., et al (2003) Mol. Vis. 9:210-216) were both shown to prevent neovascularization in an experimental model of age-related macular degeneration. In addition, direct intratumoral injection of a dsRNA in mice reduces tumor volume (Pille, J., et al (2005) Mol. Ther. 11:267-274) and can prolong survival of tumor-bearing mice (Kim, W J., et al (2006) Mol. Ther. 14:343-350; Li, S., et al (2007) Mol. Ther. 15:515-523). RNA interference has also shown success with local delivery to the CNS by direct injection (Dorn, G., et al. (2004) Nucleic Acids 32:e49; Tan, P H., et al (2005) Gene Ther. 12:59-66; Makimura, H., et al (2002) BMC Neurosci. 3:18; Shishkina, G T., et al (2004) Neuroscience 129:521-528; Thakker, E R., et al (2004) Proc. Natl. Acad. Sci. U.S.A. 101:17270-17275; Akaneya, Y., et al (2005) J. Neurophysiol. 93:594-602) and to the lungs by intranasal administration (Howard, K A., et al (2006) Mol. Ther. 14:476-484; Zhang, X., et al (2004) J. Biol. Chem. 279:10677-10684; Bitko, V., et al (2005) Nat. Med. 11:50-55). For administering an iRNA systemically for the treatment of a disease, the RNA can be modified or alternatively delivered using a drug delivery system; both methods act to prevent the rapid degradation of the dsRNA by endo- and exo-nucleases in vivo. Modification of the RNA or the pharmaceutical carrier can also permit targeting of the iRNA composition to the target tissue and avoid undesirable off-target effects. iRNA molecules can be modified by chemical conjugation to lipophilic groups such as cholesterol to enhance cellular uptake and prevent degradation. For example, an iRNA directed against ApoB conjugated to a lipophilic cholesterol moiety was injected systemically into mice and resulted in knockdown of apoB mRNA in both the liver and jejunum (Soutschek, J., et al (2004) Nature 432:173-178). Conjugation of an iRNA to an aptamer has been shown to inhibit tumor growth and mediate tumor regression in a mouse model of prostate cancer (McNamara, J O., et al (2006) Nat. Biotechnol. 24:1005-1015). In an alternative embodiment, the iRNA can be delivered using drug delivery systems such as a nanoparticle, a dendrimer, a polymer, liposomes, or a cationic delivery system. Positively charged cationic delivery systems facilitate binding of an iRNA molecule (negatively charged) and also enhance interactions at the negatively charged cell membrane to permit efficient uptake of an iRNA by the cell. Cationic lipids, dendrimers, or polymers can either be bound to an iRNA, or induced to form a vesicle or micelle (see e.g., Kim S H., et al (2008) Journal of Controlled Release 129(2):107-116) that encases an iRNA. The formation of vesicles or micelles further prevents degradation of the iRNA when administered systemically. Methods for making and administering cationic-iRNA complexes are well within the abilities of one skilled in the art (see e.g., Sorensen, D R., et al (2003) J. Mol. Biol 327:761-766; Verma, U N., et al (2003) Clin. Cancer Res. 9:1291-1300; Arnold, A S et al (2007) J. Hypertens. 25:197-205, which are incorporated herein by reference in their entirety). Some non-limiting examples of drug delivery systems useful for systemic delivery of iRNAs include DOTAP (Sorensen, D R., et al (2003), supra; Verma, U N., et al (2003), supra), Oligofectamine, “solid nucleic acid lipid particles” (Zimmermann, T S., et al (2006) Nature 441:111-114), cardiolipin (Chien, P Y., et al (2005) Cancer Gene Ther. 12:321-328; Pal, A., et al (2005) Int J. Oncol. 26:1087-1091), polyethyleneimine (Bonnet M E., et al (2008) Pharm. Res. August 16 Epub ahead of print; Aigner, A. (2006) J. Biomed. Biotechnol. 71659), Arg-Gly-Asp (RGD) peptides (Liu, S. (2006) Mol. Pharm. 3:472-487), and polyamidoamines (Tomalia, D A., et al (2007) Biochem. Soc. Trans. 35:61-67; Yoo, H., et al (1999) Pharm. Res. 16:1799-1804). In some embodiments, an iRNA forms a complex with cyclodextrin for systemic administration. Methods for administration and pharmaceutical compositions of iRNAs and cyclodextrins can be found in U.S. Pat. No. 7,427,605, which is herein incorporated by reference in its entirety.

[0411] A. Vector Encoded iRNAs of the Invention

[0412] iRNA targeting the C5 gene can be expressed from transcription units inserted into DNA or RNA vectors (see, e.g., Couture, A, et al., TIG. (1996), 12:5-10; Skillern, A., et al., International PCT Publication No. WO 00/22113, Conrad, International PCT Publication No. WO 00/22114, and Conrad, U.S. Pat. No. 6,054,299). Expression can be transient (on the order of hours to weeks) or sustained (weeks to months or longer), depending upon the specific construct used and the target tissue or cell type. These transgenes can be introduced as a linear construct, a circular plasmid, or a viral vector, which can be an integrating or non-integrating vector. The transgene can also be constructed to permit it to be inherited as an extrachromosomal plasmid (Gassmann, et al., Proc. Natl. Acad. Sci. USA (1995) 92:1292).

[0413] The individual strand or strands of an iRNA can be transcribed from a promoter on an expression vector. Where two separate strands are to be expressed to generate, for example, a dsRNA, two separate expression vectors can be co-introduced (e.g., by transfection or infection) into a target cell. Alternatively each individual strand of a dsRNA can be transcribed by promoters both of which are located on the same expression plasmid. In one embodiment, a dsRNA is expressed as inverted repeat polynucleotides joined by a linker polynucleotide sequence such that the dsRNA has a stem and loop structure.

[0414] iRNA expression vectors are generally DNA plasmids or viral vectors. Expression vectors compatible with eukaryotic cells, preferably those compatible with vertebrate cells, can be used to produce recombinant constructs for the expression of an iRNA as described herein. Eukaryotic cell expression vectors are well known in the art and are available from a number of commercial sources. Typically, such vectors are provided containing convenient restriction sites for insertion of the desired nucleic acid segment. Delivery of iRNA expressing vectors can be systemic, such as by intravenous or intramuscular administration, by administration to target cells ex-planted from the patient followed by reintroduction into the patient, or by any other means that allows for introduction into a desired target cell.

[0415] iRNA expression plasmids can be transfected into target cells as a complex with cationic lipid carriers (e.g., Oligofectamine) or non-cationic lipid-based carriers (e.g., Transit-TKO™). Multiple lipid transfections for iRNA-mediated knockdowns targeting different regions of a target RNA over a period of a week or more are also contemplated by the invention. Successful introduction of vectors into host cells can be monitored using various known methods. For example, transient transfection can be signaled with a reporter, such as a fluorescent marker, such as Green Fluorescent Protein (GFP). Stable transfection of cells ex vivo can be ensured using markers that provide the transfected cell with resistance to specific environmental factors (e.g., antibiotics and drugs), such as hygromycin B resistance.

[0416] Viral vector systems which can be utilized with the methods and compositions described herein include, but are not limited to, (a) adenovirus vectors; (b) retrovirus vectors, including but not limited to lentiviral vectors, moloney murine leukemia virus, etc.; (c) adeno-associated virus vectors; (d) herpes simplex virus vectors; (e) SV 40 vectors; (f) polyoma virus vectors; (g) papilloma virus vectors; (h) picornavirus vectors; (i) pox virus vectors such as an orthopox, e.g., vaccinia virus vectors or avipox, e.g. canary pox or fowl pox; and (j) a helper-dependent or gutless adenovirus. Replication-defective viruses can also be advantageous. Different vectors will or will not become incorporated into the cells' genome. The constructs can include viral sequences for transfection, if desired. Alternatively, the construct can be incorporated into vectors capable of episomal replication, e.g. EPV and EBV vectors. Constructs for the recombinant expression of an iRNA will generally require regulatory elements, e.g., promoters, enhancers, etc., to ensure the expression of the iRNA in target cells. Other aspects to consider for vectors and constructs are further described below.

[0417] Vectors useful for the delivery of an iRNA will include regulatory elements (promoter, enhancer, etc.) sufficient for expression of the iRNA in the desired target cell or tissue. The regulatory elements can be chosen to provide either constitutive or regulated/inducible expression.

[0418] Expression of the iRNA can be precisely regulated, for example, by using an inducible regulatory sequence that is sensitive to certain physiological regulators, e.g., circulating glucose levels, or hormones (Docherty et al., 1994, FASEB J. 8:20-24). Such inducible expression systems, suitable for the control of dsRNA expression in cells or in mammals include, for example, regulation by ecdysone, by estrogen, progesterone, tetracycline, chemical inducers of dimerization, and isopropyl-beta-D1-thiogalactopyranoside (IPTG). A person skilled in the art would be able to choose the appropriate regulatory/promoter sequence based on the intended use of the iRNA transgene.

[0419] Viral vectors that contain nucleic acid sequences encoding an iRNA can be used. For example, a retroviral vector can be used (see Miller et al., Meth. Enzymol. 217:581-599 (1993)). These retroviral vectors contain the components necessary for the correct packaging of the viral genome and integration into the host cell DNA. The nucleic acid sequences encoding an iRNA are cloned into one or more vectors, which facilitate delivery of the nucleic acid into a patient. More detail about retroviral vectors can be found, for example, in Boesen et al., Biotherapy 6:291-302 (1994), which describes the use of a retroviral vector to deliver the mdr1 gene to hematopoietic stem cells in order to make the stem cells more resistant to chemotherapy. Other references illustrating the use of retroviral vectors in gene therapy are: Clowes et al., J. Clin. Invest. 93:644-651 (1994); Kiem et al., Blood 83:1467-1473 (1994); Salmons and Gunzberg, Human Gene Therapy 4:129-141 (1993); and Grossman and Wilson, Curr. Opin. in Genetics and Devel. 3:110-114 (1993). Lentiviral vectors contemplated for use include, for example, the HIV based vectors described in U.S. Pat. Nos. 6,143,520; 5,665,557; and 5,981,276, which are herein incorporated by reference.

[0420] Adenoviruses are also contemplated for use in delivery of iRNAs of the invention. Adenoviruses are especially attractive vehicles, e.g., for delivering genes to respiratory epithelia. Adenoviruses naturally infect respiratory epithelia where they cause a mild disease. Other targets for adenovirus-based delivery systems are liver, the central nervous system, endothelial cells, and muscle. Adenoviruses have the advantage of being capable of infecting non-dividing cells. Kozarsky and Wilson, Current Opinion in Genetics and Development 3:499-503 (1993) present a review of adenovirus-based gene therapy. Bout et al., Human Gene Therapy 5:3-10 (1994) demonstrated the use of adenovirus vectors to transfer genes to the respiratory epithelia of rhesus monkeys. Other instances of the use of adenoviruses in gene therapy can be found in Rosenfeld et al., Science 252:431-434 (1991); Rosenfeld et al., Cell 68:143-155 (1992); Mastrangeli et al., J. Clin. Invest. 91:225-234 (1993); PCT Publication WO94/12649; and Wang, et al., Gene Therapy 2:775-783 (1995). A suitable AV vector for expressing an iRNA featured in the invention, a method for constructing the recombinant AV vector, and a method for delivering the vector into target cells, are described in Xia H et al. (2002), Nat. Biotech. 20: 1006-1010.

[0421] Adeno-associated virus (AAV) vectors may also be used to delivery an iRNA of the invention (Walsh et al., Proc. Soc. Exp. Biol. Med. 204:289-300 (1993); U.S. Pat. No. 5,436,146). In one embodiment, the iRNA can be expressed as two separate, complementary single-stranded RNA molecules from a recombinant AAV vector having, for example, either the U6 or H1 RNA promoters, or the cytomegalovirus (CMV) promoter. Suitable AAV vectors for expressing the dsRNA featured in the invention, methods for constructing the recombinant AV vector, and methods for delivering the vectors into target cells are described in Samulski R et al. (1987), J. Virol. 61: 3096-3101; Fisher K J et al. (1996), J. Virol, 70: 520-532; Samulski R et al. (1989), J. Virol. 63: 3822-3826; U.S. Pat. Nos. 5,252,479; 5,139,941; International Patent Application No. WO 94/13788; and International Patent Application No. WO 93/24641, the entire disclosures of which are herein incorporated by reference.

[0422] Another viral vector suitable for delivery of an iRNA of the invention is a pox virus such as a vaccinia virus, for example an attenuated vaccinia such as Modified Virus Ankara (MVA) or NYVAC, an avipox such as fowl pox or canary pox.

[0423] The tropism of viral vectors can be modified by pseudotyping the vectors with envelope proteins or other surface antigens from other viruses, or by substituting different viral capsid proteins, as appropriate. For example, lentiviral vectors can be pseudotyped with surface proteins from vesicular stomatitis virus (VSV), rabies, Ebola, Mokola, and the like. AAV vectors can be made to target different cells by engineering the vectors to express different capsid protein serotypes; see, e.g., Rabinowitz J E et al. (2002), J Virol 76:791-801, the entire disclosure of which is herein incorporated by reference.

[0424] The pharmaceutical preparation of a vector can include the vector in an acceptable diluent, or can include a slow release matrix in which the gene delivery vehicle is imbedded. Alternatively, where the complete gene delivery vector can be produced intact from recombinant cells, e.g., retroviral vectors, the pharmaceutical preparation can include one or more cells which produce the gene delivery system.

### V. Pharmaceutical Compositions of the Invention

[0425] The present invention also includes pharmaceutical compositions and formulations which include the iRNAs of the invention. In one embodiment, provided herein are pharmaceutical compositions containing an iRNA, as described herein, and a pharmaceutically acceptable carrier.

[0426] The phrase “pharmaceutically acceptable” is employed herein to refer to those compounds, materials, compositions, and/or dosage forms which are, within the scope of sound medical judgment, suitable for use in contact with the tissues of human subjects and animal subjects without excessive toxicity, irritation, allergic response, or other problem or complication, commensurate with a reasonable benefit/risk ratio.

[0427] The phrase “pharmaceutically-acceptable carrier” as used herein means a pharmaceutically-acceptable material, composition or vehicle, such as a liquid or solid filler, diluent, excipient, manufacturing aid (e.g., lubricant, talc magnesium, calcium or zinc stearate, or steric acid), or solvent encapsulating material, involved in carrying or transporting the subject compound from one organ, or portion of the body, to another organ, or portion of the body. Each carrier must be “acceptable” in the sense of being compatible with the other ingredients of the formulation and not injurious to the subject being treated. Some examples of materials which can serve as pharmaceutically-acceptable carriers include: (1) sugars, such as lactose, glucose and sucrose; (2) starches, such as corn starch and potato starch; (3) cellulose, and its derivatives, such as sodium carboxymethyl cellulose, ethyl cellulose and cellulose acetate; (4) powdered tragacanth; (5) malt; (6) gelatin; (7) lubricating agents, such as magnesium state, sodium lauryl sulfate and talc; (8) excipients, such as cocoa butter and suppository waxes; (9) oils, such as peanut oil, cottonseed oil, safflower oil, sesame oil, olive oil, corn oil and soybean oil; (10) glycols, such as propylene glycol; (11) polyols, such as glycerin, sorbitol, mannitol and polyethylene glycol; (12) esters, such as ethyl oleate and ethyl laurate; (13) agar; (14) buffering agents, such as magnesium hydroxide and aluminum hydroxide; (15) alginic acid; (16) pyrogen-free water; (17) isotonic saline; (18) Ringer's solution; (19) ethyl alcohol; (20) pH buffered solutions; (21) polyesters, polycarbonates and/or polyanhydrides; (22) bulking agents, such as polypeptides and amino acids (23) serum component, such as serum albumin, HDL and LDL; and (22) other non-toxic compatible substances employed in pharmaceutical formulations.

[0428] The pharmaceutical compositions containing the iRNA are useful for treating a disease or disorder associated with the expression or activity of a C5 gene, e.g. a complement component C5-associated disease. Such pharmaceutical compositions are formulated based on the mode of delivery. One example is compositions that are formulated for systemic administration via parenteral delivery, e.g., by subcutaneous (SC) or intravenous (IV) delivery. Another example is compositions that are formulated for direct delivery into the brain parenchyma, e.g., by infusion into the brain, such as by continuous pump infusion. The pharmaceutical compositions of the invention may be administered in dosages sufficient to inhibit expression of a C5 gene.

[0429] In one embodiment, an iRNA agent of the invention is administered to a subject as a weight-based dose. A “weight-based dose” (e.g., a dose in mg/kg) is a dose of the iRNA agent that will change depending on the subject's weight. In another embodiment, an iRNA agent is administered to a subject as a fixed dose. A “fixed dose” (e.g., a dose in mg) means that one dose of an iRNA agent is used for all subjects regardless of any specific subject-related factors, such as weight. In one particular embodiment, a fixed dose of an iRNA agent of the invention is based on a predetermined weight or age.

[0430] In general, a suitable dose of an iRNA of the invention will be in the range of about 0.001 to about 200.0 milligrams per kilogram body weight of the recipient per day, generally in the range of about 1 to 50 mg per kilogram body weight per day. For example, the dsRNA can be administered at about 0.01 mg/kg, about 0.05 mg/kg, about 0.5 mg/kg, about 1 mg/kg, about 1.5 mg/kg, about 2 mg/kg, about 3 mg/kg, about 10 mg/kg, about 20 mg/kg, about 30 mg/kg, about 40 mg/kg, or about 50 mg/kg per single dose.

[0431] For example, the dsRNA may be administered at a dose of about 0.1, 0.2, 0.3, 0.4, 0.5, 0.6, 0.7, 0.8, 0.9, 1, 1.1, 1.2, 1.3, 1.4, 1.5, 1.6, 1.7, 1.8, 1.9, 2, 2.1, 2.2, 2.3, 2.4, 2.5, 2.6, 2.7, 2.8, 2.9, 3, 3.1, 3.2, 3.3, 3.4, 3.5, 3.6, 3.7, 3.8, 3.9, 4, 4.1, 4.2, 4.3, 4.4, 4.5, 4.6, 4.7, 4.8, 4.9, 5, 5.1, 5.2, 5.3, 5.4, 5.5, 5.6, 5.7, 5.8, 5.9, 6, 6.1, 6.2, 6.3, 6.4, 6.5, 6.6, 6.7, 6.8, 6.9, 7, 7.1, 7.2, 7.3, 7.4, 7.5, 7.6, 7.7, 7.8, 7.9, 8, 8.1, 8.2, 8.3, 8.4, 8.5, 8.6, 8.7, 8.8, 8.9, 9, 9.1, 9.2, 9.3, 9.4, 9.5, 9.6, 9.7, 9.8, 9.9, or about 10 mg/kg. Values and ranges intermediate to the recited values are also intended to be part of this invention.

[0432] In another embodiment, the dsRNA is administered at a dose of about 0.1 to about 50 mg/kg, about 0.25 to about 50 mg/kg, about 0.5 to about 50 mg/kg, about 0.75 to about 50 mg/kg, about 1 to about 50 mg/mg, about 1.5 to about 50 mg/kb, about 2 to about 50 mg/kg, about 2.5 to about 50 mg/kg, about 3 to about 50 mg/kg, about 3.5 to about 50 mg/kg, about 4 to about 50 mg/kg, about 4.5 to about 50 mg/kg, about 5 to about 50 mg/kg, about 7.5 to about 50 mg/kg, about 10 to about 50 mg/kg, about 15 to about 50 mg/kg, about 20 to about 50 mg/kg, about 20 to about 50 mg/kg, about 25 to about 50 mg/kg, about 25 to about 50 mg/kg, about 30 to about 50 mg/kg, about 35 to about 50 mg/kg, about 40 to about 50 mg/kg, about 45 to about 50 mg/kg, about 0.1 to about 45 mg/kg, about 0.25 to about 45 mg/kg, about 0.5 to about 45 mg/kg, about 0.75 to about 45 mg/kg, about 1 to about 45 mg/mg, about 1.5 to about 45 mg/kb, about 2 to about 45 mg/kg, about 2.5 to about 45 mg/kg, about 3 to about 45 mg/kg, about 3.5 to about 45 mg/kg, about 4 to about 45 mg/kg, about 4.5 to about 45 mg/kg, about 5 to about 45 mg/kg, about 7.5 to about 45 mg/kg, about 10 to about 45 mg/kg, about 15 to about 45 mg/kg, about 20 to about 45 mg/kg, about 20 to about 45 mg/kg, about 25 to about 45 mg/kg, about 25 to about 45 mg/kg, about 30 to about 45 mg/kg, about 35 to about 45 mg/kg, about 40 to about 45 mg/kg, about 0.1 to about 40 mg/kg, about 0.25 to about 40 mg/kg, about 0.5 to about 40 mg/kg, about 0.75 to about 40 mg/kg, about 1 to about 40 mg/mg, about 1.5 to about 40 mg/kb, about 2 to about 40 mg/kg, about 2.5 to about 40 mg/kg, about 3 to about 40 mg/kg, about 3.5 to about 40 mg/kg, about 4 to about 40 mg/kg, about 4.5 to about 40 mg/kg, about 5 to about 40 mg/kg, about 7.5 to about 40 mg/kg, about 10 to about 40 mg/kg, about 15 to about 40 mg/kg, about 20 to about 40 mg/kg, about 20 to about 40 mg/kg, about 25 to about 40 mg/kg, about 25 to about 40 mg/kg, about 30 to about 40 mg/kg, about 35 to about 40 mg/kg, about 0.1 to about 30 mg/kg, about 0.25 to about 30 mg/kg, about 0.5 to about 30 mg/kg, about 0.75 to about 30 mg/kg, about 1 to about 30 mg/mg, about 1.5 to about 30 mg/kb, about 2 to about 30 mg/kg, about 2.5 to about 30 mg/kg, about 3 to about 30 mg/kg, about 3.5 to about 30 mg/kg, about 4 to about 30 mg/kg, about 4.5 to about 30 mg/kg, about 5 to about 30 mg/kg, about 7.5 to about 30 mg/kg, about 10 to about 30 mg/kg, about 15 to about 30 mg/kg, about 20 to about 30 mg/kg, about 20 to about 30 mg/kg, about 25 to about 30 mg/kg, about 0.1 to about 20 mg/kg, about 0.25 to about 20 mg/kg, about 0.5 to about 20 mg/kg, about 0.75 to about 20 mg/kg, about 1 to about 20 mg/mg, about 1.5 to about 20 mg/kb, about 2 to about 20 mg/kg, about 2.5 to about 20 mg/kg, about 3 to about 20 mg/kg, about 3.5 to about 20 mg/kg, about 4 to about 20 mg/kg, about 4.5 to about 20 mg/kg, about 5 to about 20 mg/kg, about 7.5 to about 20 mg/kg, about 10 to about 20 mg/kg, or about 15 to about 20 mg/kg. Values and ranges intermediate to the recited values are also intended to be part of this invention.

[0433] For example, the dsRNA may be administered at a dose of about 0.01, 0.02, 0.03, 0.04, 0.05, 0.06, 0.07, 0.08, 0.09, 0.1, 0.2, 0.3, 0.4, 0.5, 0.6, 0.7, 0.8, 0.9, 1, 1.1, 1.2, 1.3, 1.4, 1.5, 1.6, 1.7, 1.8, 1.9, 2, 2.1, 2.2, 2.3, 2.4, 2.5, 2.6, 2.7, 2.8, 2.9, 3, 3.1, 3.2, 3.3, 3.4, 3.5, 3.6, 3.7, 3.8, 3.9, 4, 4.1, 4.2, 4.3, 4.4, 4.5, 4.6, 4.7, 4.8, 4.9, 5, 5.1, 5.2, 5.3, 5.4, 5.5, 5.6, 5.7, 5.8, 5.9, 6, 6.1, 6.2, 6.3, 6.4, 6.5, 6.6, 6.7, 6.8, 6.9, 7, 7.1, 7.2, 7.3, 7.4, 7.5, 7.6, 7.7, 7.8, 7.9, 8, 8.1, 8.2, 8.3, 8.4, 8.5, 8.6, 8.7, 8.8, 8.9, 9, 9.1, 9.2, 9.3, 9.4, 9.5, 9.6, 9.7, 9.8, 9.9, or about 10 mg/kg. Values and ranges intermediate to the recited values are also intended to be part of this invention.

[0434] In another embodiment, the dsRNA is administered at a dose of about 0.5 to about 50 mg/kg, about 0.75 to about 50 mg/kg, about 1 to about 50 mg/mg, about 1.5 to about 50 mg/kb, about 2 to about 50 mg/kg, about 2.5 to about 50 mg/kg, about 3 to about 50 mg/kg, about 3.5 to about 50 mg/kg, about 4 to about 50 mg/kg, about 4.5 to about 50 mg/kg, about 5 to about 50 mg/kg, about 7.5 to about 50 mg/kg, about 10 to about 50 mg/kg, about 15 to about 50 mg/kg, about 20 to about 50 mg/kg, about 20 to about 50 mg/kg, about 25 to about 50 mg/kg, about 25 to about 50 mg/kg, about 30 to about 50 mg/kg, about 35 to about 50 mg/kg, about 40 to about 50 mg/kg, about 45 to about 50 mg/kg, about 0.5 to about 45 mg/kg, about 0.75 to about 45 mg/kg, about 1 to about 45 mg/mg, about 1.5 to about 45 mg/kb, about 2 to about 45 mg/kg, about 2.5 to about 45 mg/kg, about 3 to about 45 mg/kg, about 3.5 to about 45 mg/kg, about 4 to about 45 mg/kg, about 4.5 to about 45 mg/kg, about 5 to about 45 mg/kg, about 7.5 to about 45 mg/kg, about 10 to about 45 mg/kg, about 15 to about 45 mg/kg, about 20 to about 45 mg/kg, about 20 to about 45 mg/kg, about 25 to about 45 mg/kg, about 25 to about 45 mg/kg, about 30 to about 45 mg/kg, about 35 to about 45 mg/kg, about 40 to about 45 mg/kg, about 0.5 to about 40 mg/kg, about 0.75 to about 40 mg/kg, about 1 to about 40 mg/mg, about 1.5 to about 40 mg/kb, about 2 to about 40 mg/kg, about 2.5 to about 40 mg/kg, about 3 to about 40 mg/kg, about 3.5 to about 40 mg/kg, about 4 to about 40 mg/kg, about 4.5 to about 40 mg/kg, about 5 to about 40 mg/kg, about 7.5 to about 40 mg/kg, about 10 to about 40 mg/kg, about 15 to about 40 mg/kg, about 20 to about 40 mg/kg, about 20 to about 40 mg/kg, about 25 to about 40 mg/kg, about 25 to about 40 mg/kg, about 30 to about 40 mg/kg, about 35 to about 40 mg/kg, about 0.5 to about 30 mg/kg, about 0.75 to about 30 mg/kg, about 1 to about 30 mg/mg, about 1.5 to about 30 mg/kb, about 2 to about 30 mg/kg, about 2.5 to about 30 mg/kg, about 3 to about 30 mg/kg, about 3.5 to about 30 mg/kg, about 4 to about 30 mg/kg, about 4.5 to about 30 mg/kg, about 5 to about 30 mg/kg, about 7.5 to about 30 mg/kg, about 10 to about 30 mg/kg, about 15 to about 30 mg/kg, about 20 to about 30 mg/kg, about 20 to about 30 mg/kg, about 25 to about 30 mg/kg, about 0.5 to about 20 mg/kg, about 0.75 to about 20 mg/kg, about 1 to about 20 mg/mg, about 1.5 to about 20 mg/kb, about 2 to about 20 mg/kg, about 2.5 to about 20 mg/kg, about 3 to about 20 mg/kg, about 3.5 to about 20 mg/kg, about 4 to about 20 mg/kg, about 4.5 to about 20 mg/kg, about 5 to about 20 mg/kg, about 7.5 to about 20 mg/kg, about 10 to about 20 mg/kg, or about 15 to about 20 mg/kg. In one embodiment, the dsRNA is administered at a dose of about 10 mg/kg to about 30 mg/kg. Values and ranges intermediate to the recited values are also intended to be part of this invention.

[0435] For example, subjects can be administered, e.g., subcutaneously or intravenously, a single therapeutic amount of iRNA, such as about 0.1, 0.125, 0.15, 0.175, 0.2, 0.225, 0.25, 0.275, 0.3, 0.325, 0.35, 0.375, 0.4, 0.425, 0.45, 0.475, 0.5, 0.525, 0.55, 0.575, 0.6, 0.625, 0.65, 0.675, 0.7, 0.725, 0.75, 0.775, 0.8, 0.825, 0.85, 0.875, 0.9, 0.925, 0.95, 0.975, 1, 1.1, 1.2, 1.3, 1.4, 1.5, 1.6, 1.7, 1.8, 1.9, 2, 2.1, 2.2, 2.3, 2.4, 2.5, 2.6, 2.7, 2.8, 2.9, 3, 3.1, 3.2, 3.3, 3.4, 3.5, 3.6, 3.7, 3.8, 3.9, 4, 4.1, 4.2, 4.3, 4.4, 4.5, 4.6, 4.7, 4.8, 4.9, 5, 5.1, 5.2, 5.3, 5.4, 5.5, 5.6, 5.7, 5.8, 5.9, 6, 6.1, 6.2, 6.3, 6.4, 6.5, 6.6, 6.7, 6.8, 6.9, 7, 7.1, 7.2, 7.3, 7.4, 7.5, 7.6, 7.7, 7.8, 7.9, 8, 8.1, 8.2, 8.3, 8.4, 8.5, 8.6, 8.7, 8.8, 8.9, 9, 9.1, 9.2, 9.3, 9.4, 9.5, 9.6, 9.7, 9.8, 9.9, 10, 10.5, 11, 11.5, 12, 12.5, 13, 13.5, 14, 14.5, 15, 15.5, 16, 16.5, 17, 17.5, 18, 18.5, 19, 19.5, 20, 20.5, 21, 21.5, 22, 22.5, 23, 23.5, 24, 24.5, 25, 25.5, 26, 26.5, 27, 27.5, 28, 28.5, 29, 29.5, 30, 31, 32, 33, 34, 34, 35, 36, 37, 38, 39, 40, 41, 42, 43, 44, 45, 46, 47, 48, 49, or about 50 mg/kg. Values and ranges intermediate to the recited values are also intended to be part of this invention.

[0436] In some embodiments, subjects are administered, e.g., subcutaneously or intravenously, multiple doses of a therapeutic amount of iRNA, such as a dose about 0.1, 0.125, 0.15, 0.175, 0.2, 0.225, 0.25, 0.275, 0.3, 0.325, 0.35, 0.375, 0.4, 0.425, 0.45, 0.475, 0.5, 0.525, 0.55, 0.575, 0.6, 0.625, 0.65, 0.675, 0.7, 0.725, 0.75, 0.775, 0.8, 0.825, 0.85, 0.875, 0.9, 0.925, 0.95, 0.975, 1, 1.1, 1.2, 1.3, 1.4, 1.5, 1.6, 1.7, 1.8, 1.9, 2, 2.1, 2.2, 2.3, 2.4, 2.5, 2.6, 2.7, 2.8, 2.9, 3, 3.1, 3.2, 3.3, 3.4, 3.5, 3.6, 3.7, 3.8, 3.9, 4, 4.1, 4.2, 4.3, 4.4, 4.5, 4.6, 4.7, 4.8, 4.9, 5, 5.1, 5.2, 5.3, 5.4, 5.5, 5.6, 5.7, 5.8, 5.9, 6, 6.1, 6.2, 6.3, 6.4, 6.5, 6.6, 6.7, 6.8, 6.9, 7, 7.1, 7.2, 7.3, 7.4, 7.5, 7.6, 7.7, 7.8, 7.9, 8, 8.1, 8.2, 8.3, 8.4, 8.5, 8.6, 8.7, 8.8, 8.9, 9, 9.1, 9.2, 9.3, 9.4, 9.5, 9.6, 9.7, 9.8, 9.9, 10, 10.5, 11, 11.5, 12, 12.5, 13, 13.5, 14, 14.5, 15, 15.5, 16, 16.5, 17, 17.5, 18, 18.5, 19, 19.5, 20, 20.5, 21, 21.5, 22, 22.5, 23, 23.5, 24, 24.5, 25, 25.5, 26, 26.5, 27, 27.5, 28, 28.5, 29, 29.5, 30, 31, 32, 33, 34, 34, 35, 36, 37, 38, 39, 40, 41, 42, 43, 44, 45, 46, 47, 48, 49, or about 50 mg/kg. A multi-dose regimine may include administration of a therapeutic amount of iRNA daily, such as for two days, three days, four days, five days, six days, seven days, or longer.

[0437] In other embodiments, subjects are administered, e.g., subcutaneously or intravenously, a repeat dose of a therapeutic amount of iRNA, such as a dose about 0.1, 0.125, 0.15, 0.175, 0.2, 0.225, 0.25, 0.275, 0.3, 0.325, 0.35, 0.375, 0.4, 0.425, 0.45, 0.475, 0.5, 0.525, 0.55, 0.575, 0.6, 0.625, 0.65, 0.675, 0.7, 0.725, 0.75, 0.775, 0.8, 0.825, 0.85, 0.875, 0.9, 0.925, 0.95, 0.975, 1, 1.1, 1.2, 1.3, 1.4, 1.5, 1.6, 1.7, 1.8, 1.9, 2, 2.1, 2.2, 2.3, 2.4, 2.5, 2.6, 2.7, 2.8, 2.9, 3, 3.1, 3.2, 3.3, 3.4, 3.5, 3.6, 3.7, 3.8, 3.9, 4, 4.1, 4.2, 4.3, 4.4, 4.5, 4.6, 4.7, 4.8, 4.9, 5, 5.1, 5.2, 5.3, 5.4, 5.5, 5.6, 5.7, 5.8, 5.9, 6, 6.1, 6.2, 6.3, 6.4, 6.5, 6.6, 6.7, 6.8, 6.9, 7, 7.1, 7.2, 7.3, 7.4, 7.5, 7.6, 7.7, 7.8, 7.9, 8, 8.1, 8.2, 8.3, 8.4, 8.5, 8.6, 8.7, 8.8, 8.9, 9, 9.1, 9.2, 9.3, 9.4, 9.5, 9.6, 9.7, 9.8, 9.9, 10, 10.5, 11, 11.5, 12, 12.5, 13, 13.5, 14, 14.5, 15, 15.5, 16, 16.5, 17, 17.5, 18, 18.5, 19, 19.5, 20, 20.5, 21, 21.5, 22, 22.5, 23, 23.5, 24, 24.5, 25, 25.5, 26, 26.5, 27, 27.5, 28, 28.5, 29, 29.5, 30, 31, 32, 33, 34, 34, 35, 36, 37, 38, 39, 40, 41, 42, 43, 44, 45, 46, 47, 48, 49, or about 50 mg/kg. A repeat-dose regimine may include administration of a therapeutic amount of iRNA on a regular basis, such as every other day, every third day, every fourth day, twice a week, once a week, every other week, or once a month.

[0438] In certain embodiments, for example, when a composition of the invention comprises a dsRNA as described herein and a lipid, subjects can be administered a therapeutic amount of iRNA, such as about 0.01 mg/kg to about 5 mg/kg, about 0.01 mg/kg to about 10 mg/kg, about 0.05 mg/kg to about 5 mg/kg, about 0.05 mg/kg to about 10 mg/kg, about 0.1 mg/kg to about 5 mg/kg, about 0.1 mg/kg to about 10 mg/kg, about 0.2 mg/kg to about 5 mg/kg, about 0.2 mg/kg to about 10 mg/kg, about 0.3 mg/kg to about 5 mg/kg, about 0.3 mg/kg to about 10 mg/kg, about 0.4 mg/kg to about 5 mg/kg, about 0.4 mg/kg to about 10 mg/kg, about 0.5 mg/kg to about 5 mg/kg, about 0.5 mg/kg to about 10 mg/kg, about 1 mg/kg to about 5 mg/kg, about 1 mg/kg to about 10 mg/kg, about 1.5 mg/kg to about 5 mg/kg, about 1.5 mg/kg to about 10 mg/kg, about 2 mg/kg to about 2.5 mg/kg, about 2 mg/kg to about 10 mg/kg, about 3 mg/kg to about 5 mg/kg, about 3 mg/kg to about 10 mg/kg, about 3.5 mg/kg to about 5 mg/kg, about 4 mg/kg to about 5 mg/kg, about 4.5 mg/kg to about 5 mg/kg, about 4 mg/kg to about 10 mg/kg, about 4.5 mg/kg to about 10 mg/kg, about 5 mg/kg to about 10 mg/kg, about 5.5 mg/kg to about 10 mg/kg, about 6 mg/kg to about 10 mg/kg, about 6.5 mg/kg to about 10 mg/kg, about 7 mg/kg to about 10 mg/kg, about 7.5 mg/kg to about 10 mg/kg, about 8 mg/kg to about 10 mg/kg, about 8.5 mg/kg to about 10 mg/kg, about 9 mg/kg to about 10 mg/kg, or about 9.5 mg/kg to about 10 mg/kg. Values and ranges intermediate to the recited values are also intended to be part of this invention.

[0439] For example, the dsRNA may be administered at a dose of about 0.1, 0.2, 0.3, 0.4, 0.5, 0.6, 0.7, 0.8, 0.9, 1, 1.1, 1.2, 1.3, 1.4, 1.5, 1.6, 1.7, 1.8, 1.9, 2, 2.1, 2.2, 2.3, 2.4, 2.5, 2.6, 2.7, 2.8, 2.9, 3, 3.1, 3.2, 3.3, 3.4, 3.5, 3.6, 3.7, 3.8, 3.9, 4, 4.1, 4.2, 4.3, 4.4, 4.5, 4.6, 4.7, 4.8, 4.9, 5, 5.1, 5.2, 5.3, 5.4, 5.5, 5.6, 5.7, 5.8, 5.9, 6, 6.1, 6.2, 6.3, 6.4, 6.5, 6.6, 6.7, 6.8, 6.9, 7, 7.1, 7.2, 7.3, 7.4, 7.5, 7.6, 7.7, 7.8, 7.9, 8, 8.1, 8.2, 8.3, 8.4, 8.5, 8.6, 8.7, 8.8, 8.9, 9, 9.1, 9.2, 9.3, 9.4, 9.5, 9.6, 9.7, 9.8, 9.9, or about 10 mg/kg. Values and ranges intermediate to the recited values are also intended to be part of this invention.

[0440] In certain embodiments of the invention, for example, when a double stranded RNAi agent includes a modification (e.g., one or more motifs of three identical modifications on three consecutive nucleotides), including one such motif at or near the cleavage site of the agent, six phosphorothioate linkages, and a ligand, such an agent is administered at a dose of about 0.01 to about 0.5 mg/kg, about 0.01 to about 0.4 mg/kg, about 0.01 to about 0.3 mg/kg, about 0.01 to about 0.2 mg/kg, about 0.01 to about 0.1 mg/kg, about 0.01 mg/kg to about 0.09 mg/kg, about 0.01 mg/kg to about 0.08 mg/kg, about 0.01 mg/kg to about 0.07 mg/kg, about 0.01 mg/kg to about 0.06 mg/kg, about 0.01 mg/kg to about 0.05 mg/kg, about 0.02 to about 0.5 mg/kg, about 0.02 to about 0.4 mg/kg, about 0.02 to about 0.3 mg/kg, about 0.02 to about 0.2 mg/kg, about 0.02 to about 0.1 mg/kg, about 0.02 mg/kg to about 0.09 mg/kg, about 0.02 mg/kg to about 0.08 mg/kg, about 0.02 mg/kg to about 0.07 mg/kg, about 0.02 mg/kg to about 0.06 mg/kg, about 0.02 mg/kg to about 0.05 mg/kg, about 0.03 to about 0.5 mg/kg, about 0.03 to about 0.4 mg/kg, about 0.03 to about 0.3 mg/kg, about 0.03 to about 0.2 mg/kg, about 0.03 to about 0.1 mg/kg, about 0.03 mg/kg to about 0.09 mg/kg, about 0.03 mg/kg to about 0.08 mg/kg, about 0.03 mg/kg to about 0.07 mg/kg, about 0.03 mg/kg to about 0.06 mg/kg, about 0.03 mg/kg to about 0.05 mg/kg, about 0.04 to about 0.5 mg/kg, about 0.04 to about 0.4 mg/kg, about 0.04 to about 0.3 mg/kg, about 0.04 to about 0.2 mg/kg, about 0.04 to about 0.1 mg/kg, about 0.04 mg/kg to about 0.09 mg/kg, about 0.04 mg/kg to about 0.08 mg/kg, about 0.04 mg/kg to about 0.07 mg/kg, about 0.04 mg/kg to about 0.06 mg/kg, about 0.05 to about 0.5 mg/kg, about 0.05 to about 0.4 mg/kg, about 0.05 to about 0.3 mg/kg, about 0.05 to about 0.2 mg/kg, about 0.05 to about 0.1 mg/kg, about 0.05 mg/kg to about 0.09 mg/kg, about 0.05 mg/kg to about 0.08 mg/kg, or about 0.05 mg/kg to about 0.07 mg/kg. Values and ranges intermediate to the foregoing recited values are also intended to be part of this invention, e.g., the RNAi agent may be administered to the subject at a dose of about 0.015 mg/kg to about 0.45 mg/kg.

[0441] For example, the RNAi agent, e.g., RNAi agent in a pharmaceutical composition, may be administered at a dose of about 0.01 mg/kg, 0.0125 mg/kg, 0.015 mg/kg, 0.0175 mg/kg, 0.02 mg/kg, 0.0225 mg/kg, 0.025 mg/kg, 0.0275 mg/kg, 0.03 mg/kg, 0.0325 mg/kg, 0.035 mg/kg, 0.0375 mg/kg, 0.04 mg/kg, 0.0425 mg/kg, 0.045 mg/kg, 0.0475 mg/kg, 0.05 mg/kg, 0.0525 mg/kg, 0.055 mg/kg, 0.0575 mg/kg, 0.06 mg/kg, 0.0625 mg/kg, 0.065 mg/kg, 0.0675 mg/kg, 0.07 mg/kg, 0.0725 mg/kg, 0.075 mg/kg, 0.0775 mg/kg, 0.08 mg/kg, 0.0825 mg/kg, 0.085 mg/kg, 0.0875 mg/kg, 0.09 mg/kg, 0.0925 mg/kg, 0.095 mg/kg, 0.0975 mg/kg, 0.1 mg/kg, 0.125 mg/kg, 0.15 mg/kg, 0.175 mg/kg, 0.2 mg/kg, 0.225 mg/kg, 0.25 mg/kg, 0.275 mg/kg, 0.3 mg/kg, 0.325 mg/kg, 0.35 mg/kg, 0.375 mg/kg, 0.4 mg/kg, 0.425 mg/kg, 0.45 mg/kg, 0.475 mg/kg, or about 0.5 mg/kg. Values intermediate to the foregoing recited values are also intended to be part of this invention.

[0442] In some embodiments, the RNAi agent is administered as a fixed dose of between about 25 mg to about 900 mg, e.g., between about 25 mg to about 850 mg, between about 25 mg to about 500 mg, between about 25 mg to about 400 mg, between about 25 mg to about 300 mg, between about 50 mg to about 850 mg, between about 50 mg to about 500 mg, between about 50 mg to about 400 mg, between about 50 mg to about 300 mg, between about 100 mg to about 850 mg, between about 100 mg to about 500 mg, between about 100 mg to about 400 mg, between about 100 mg to about 300 mg, between about 200 mg to about 850 mg, between about 200 mg to about 500 mg, between about 200 mg to about 400 mg, between about 200 mg to about 300 mg, between about 100 mg to about 800 mg, between about 100 mg to about 750 mg, between about 100 mg to about 700 mg, between about 100 mg to about 650 mg, between about 100 mg to about 600 mg, between about 100 mg to about 550 mg, between about 100 mg to about 500 mg, between about 200 mg to about 850 mg, between about 200 mg to about 800 mg, between about 200 mg to about 750 mg, between about 200 mg to about 700 mg, between about 200 mg to about 650 mg, between about 200 mg to about 600 mg, between about 200 mg to about 550 mg, between about 200 mg to about 500 mg, between about 300 mg to about 850 mg, between about 300 mg to about 800 mg, between about 300 mg to about 750 mg, between about 300 mg to about 700 mg, between about 300 mg to about 650 mg, between about 300 mg to about 600 mg, between about 300 mg to about 550 mg, between about 300 mg to about 500 mg, between about 400 mg to about 850 mg, between about 400 mg to about 800 mg, between about 400 mg to about 750 mg, between about 400 mg to about 700 mg, between about 400 mg to about 650 mg, between about 400 mg to about 600 mg, between about 400 mg to about 550 mg, or between about 400 mg to about 500 mg.

[0443] In some embodiments, the RNAi agent is administered as a fixed dose of about 25 mg, about 50 mg, about 75 mg, about 100 mg, about 125 mg, about 150 mg, about 175 mg, 200 mg, about 225 mg, about 250 mg, about 275 mg, about 300 mg, about 325 mg, about 350 mg, about 375 mg, about 400 mg, about 425 mg, about 450 mg, about 475 mg, about 500 mg, about 525 mg, about 550 mg, about 575 mg, about 600 mg, about 625 mg, about 650 mg, about 675 mg, about 700 mg, about 725 mg, about 750 mg, about 775 mg, about 800 mg, about 825 mg, about 850 mg, about 875 mg, or about 900 mg.

[0444] The pharmaceutical composition can be administered by intravenous infusion over a period of time, such as over a 5, 6, 7, 8, 9, 10, 11, 12, 13, 14, 15, 16, 17, 18, 19, 20, and 21, 22, 23, 24, or about a 25 minute period. The administration may be repeated, for example, on a regular basis, such as weekly, biweekly (i.e., every two weeks) for one month, two months, three months, four months or longer. After an initial treatment regimen, the treatments can be administered on a less frequent basis. For example, after administration weekly or biweekly for three months, administration can be repeated once per month, for six months or a year or longer.

[0445] The pharmaceutical composition can be administered once daily, or the iRNA can be administered as two, three, or more sub-doses at appropriate intervals throughout the day or even using continuous infusion or delivery through a controlled release formulation. In that case, the iRNA contained in each sub-dose must be correspondingly smaller in order to achieve the total daily dosage. The dosage unit can also be compounded for delivery over several days, e.g., using a conventional sustained release formulation which provides sustained release of the iRNA over a several day period. Sustained release formulations are well known in the art and are particularly useful for delivery of agents at a particular site, such as could be used with the agents of the present invention. In this embodiment, the dosage unit contains a corresponding multiple of the daily dose.

[0446] In other embodiments, a single dose of the pharmaceutical compositions can be long lasting, such that subsequent doses are administered at not more than 3, 4, or 5 day intervals, or at not more than 1, 2, 3, or 4 week intervals. In some embodiments of the invention, a single dose of the pharmaceutical compositions of the invention is administered once per week. In other embodiments of the invention, a single dose of the pharmaceutical compositions of the invention is administered bi-monthly (i.e., every two weeks) for one month, two months, three months, four months or longer. After an initial treatment regimen, the treatments can be administered on a less frequent basis. For example, after administration weekly or biweekly for three months, administration can be repeated once per month, for six months or a year or longer, e.g., administered chronically.

[0447] The skilled artisan will appreciate that certain factors can influence the dosage and timing required to effectively treat a subject, including but not limited to the severity of the disease or disorder, previous treatments, the general health and/or age of the subject, and other diseases present. Moreover, treatment of a subject with a therapeutically effective amount of a composition can include a single treatment or a series of treatments. Estimates of effective dosages and in vivo half-lives for the individual iRNAs encompassed by the invention can be made using conventional methodologies or on the basis of in vivo testing using an appropriate animal model, as described elsewhere herein.

[0448] Advances in mouse genetics have generated a number of mouse models for the study of various human diseases, such as a disorder that would benefit from reduction in the expression of C5. Such models can be used for in vivo testing of iRNA, as well as for determining a therapeutically effective dose. Suitable mouse models are known in the art and include, for example, collagen-induced arthritis mouse model (Courtenay, J. S., et al. (1980) Nature 283, 666-668), myocardial ischemia (Homeister J W and Lucchesi B R (1994) Annu Rev Pharmacol Toxicol 34:17-40), ovalbumin induced asthma mouse models (e.g., Tomkinson A., et al. (2001). J. Immunol. 166, 5792-5800), (NZB×NZW)F1, MRL/Fas^{lpr} (MRL/lpr) and BXSB mouse models (Theofilopoulos, A. N. and Kono, D. H. 1999. Murine lupus models: gene-specific and genome-wide studies. In Lahita R. G., ed., Systemic Lupus Erythematosus, 3rd edn, p. 145. Academic Press, San Diego, Calif.), mouse aHUS model (Goicoechea de Jorge et al. (2011) The development of atypical hemolytic uremic syndrome depeds on complement C5, J Am Soc Nephrol 22:137-145.

[0449] The pharmaceutical compositions of the present invention can be administered in a number of ways depending upon whether local or systemic treatment is desired and upon the area to be treated. Administration can be topical (e.g., by a transdermal patch), pulmonary, e.g., by inhalation or insufflation of powders or aerosols, including by nebulizer; intratracheal, intranasal, epidermal and transdermal, oral or parenteral. Parenteral administration includes intravenous, intraarterial, subcutaneous, intraperitoneal or intramuscular injection or infusion; subdermal, e.g., via an implanted device; or intracranial, e.g., by intraparenchymal, intrathecal or intraventricular, administration.

[0450] The iRNA can be delivered in a manner to target a particular tissue, such as the liver (e.g., the hepatocytes of the liver).

[0451] Pharmaceutical compositions and formulations for topical administration can include transdermal patches, ointments, lotions, creams, gels, drops, suppositories, sprays, liquids and powders. Conventional pharmaceutical carriers, aqueous, powder or oily bases, thickeners and the like can be necessary or desirable. Coated condoms, gloves and the like can also be useful. Suitable topical formulations include those in which the iRNAs featured in the invention are in admixture with a topical delivery agent such as lipids, liposomes, fatty acids, fatty acid esters, steroids, chelating agents and surfactants. Suitable lipids and liposomes include neutral (e.g., dioleoylphosphatidyl DOPE ethanolamine, dimyristoylphosphatidyl choline DMPC, distearolyphosphatidyl choline) negative (e.g., dimyristoylphosphatidyl glycerol DMPG) and cationic (e.g., dioleoyltetramethylaminopropyl DOTAP and dioleoylphosphatidyl ethanolamine DOTMA). iRNAs featured in the invention can be encapsulated within liposomes or can form complexes thereto, in particular to cationic liposomes. Alternatively, iRNAs can be complexed to lipids, in particular to cationic lipids. Suitable fatty acids and esters include but are not limited to arachidonic acid, oleic acid, eicosanoic acid, lauric acid, caprylic acid, capric acid, myristic acid, palmitic acid, stearic acid, linoleic acid, linolenic acid, dicaprate, tricaprate, monoolein, dilaurin, glyceryl 1-monocaprate, 1-dodecylazacycloheptan-2-one, an acylcarnitine, an acylcholine, or a C₁₋₂₀ alkyl ester (e.g., isopropylmyristate IPM), monoglyceride, diglyceride or pharmaceutically acceptable salt thereof). Topical formulations are described in detail in U.S. Pat. No. 6,747,014, which is incorporated herein by reference.

[0452] A. iRNA Formulations Comprising Membranous Molecular Assemblies

[0453] An iRNA for use in the compositions and methods of the invention can be formulated for delivery in a membranous molecular assembly, e.g., a liposome or a micelle. As used herein, the term “liposome” refers to a vesicle composed of amphiphilic lipids arranged in at least one bilayer, e.g., one bilayer or a plurality of bilayers. Liposomes include unilamellar and multilamellar vesicles that have a membrane formed from a lipophilic material and an aqueous interior. The aqueous portion contains the iRNA composition. The lipophilic material isolates the aqueous interior from an aqueous exterior, which typically does not include the iRNA composition, although in some examples, it may. Liposomes are useful for the transfer and delivery of active ingredients to the site of action. Because the liposomal membrane is structurally similar to biological membranes, when liposomes are applied to a tissue, the liposomal bilayer fuses with bilayer of the cellular membranes. As the merging of the liposome and cell progresses, the internal aqueous contents that include the iRNA are delivered into the cell where the iRNA can specifically bind to a target RNA and can mediate RNAi. In some cases the liposomes are also specifically targeted, e.g., to direct the iRNA to particular cell types.

[0454] A liposome containing a RNAi agent can be prepared by a variety of methods. In one example, the lipid component of a liposome is dissolved in a detergent so that micelles are formed with the lipid component. For example, the lipid component can be an amphipathic cationic lipid or lipid conjugate. The detergent can have a high critical micelle concentration and may be nonionic. Exemplary detergents include cholate, CHAPS, octylglucoside, deoxycholate, and lauroyl sarcosine. The RNAi agent preparation is then added to the micelles that include the lipid component. The cationic groups on the lipid interact with the RNAi agent and condense around the RNAi agent to form a liposome. After condensation, the detergent is removed, e.g., by dialysis, to yield a liposomal preparation of RNAi agent.

[0455] If necessary a carrier compound that assists in condensation can be added during the condensation reaction, e.g., by controlled addition. For example, the carrier compound can be a polymer other than a nucleic acid (e.g., spermine or spermidine). pH can also adjusted to favor condensation.

[0456] Methods for producing stable polynucleotide delivery vehicles, which incorporate a polynucleotide/cationic lipid complex as structural components of the delivery vehicle, are further described in, e.g., WO 96/37194, the entire contents of which are incorporated herein by reference. Liposome formation can also include one or more aspects of exemplary methods described in Felgner, P. L. et al., Proc. Natl. Acad. Sci., USA 8:7413-7417, 1987; U.S. Pat. Nos. 4,897,355; 5,171,678; Bangham, et al. M. Mol. Biol. 23:238, 1965; Olson, et al. Biochim. Biophys. Acta 557:9, 1979; Szoka, et al. Proc. Natl. Acad. Sci. 75: 4194, 1978; Mayhew, et al. Biochim. Biophys. Acta 775:169, 1984; Kim, et al. Biochim. Biophys. Acta 728:339, 1983; and Fukunaga, et al. Endocrinol. 115:757, 1984. Commonly used techniques for preparing lipid aggregates of appropriate size for use as delivery vehicles include sonication and freeze-thaw plus extrusion (see, e.g., Mayer, et al. Biochim. Biophys. Acta 858:161, 1986). Microfluidization can be used when consistently small (50 to 200 nm) and relatively uniform aggregates are desired (Mayhew, et al. Biochim. Biophys. Acta 775:169, 1984). These methods are readily adapted to packaging RNAi agent preparations into liposomes.

[0457] Liposomes fall into two broad classes. Cationic liposomes are positively charged liposomes which interact with the negatively charged nucleic acid molecules to form a stable complex. The positively charged nucleic acid/liposome complex binds to the negatively charged cell surface and is internalized in an endosome. Due to the acidic pH within the endosome, the liposomes are ruptured, releasing their contents into the cell cytoplasm (Wang et al., Biochem. Biophys. Res. Commun., 1987, 147, 980-985).

[0458] Liposomes which are pH-sensitive or negatively-charged, entrap nucleic acids rather than complex with it. Since both the nucleic acid and the lipid are similarly charged, repulsion rather than complex formation occurs. Nevertheless, some nucleic acid is entrapped within the aqueous interior of these liposomes. pH-sensitive liposomes have been used to deliver nucleic acids encoding the thymidine kinase gene to cell monolayers in culture. Expression of the exogenous gene was detected in the target cells (Zhou et al., Journal of Controlled Release, 1992, 19, 269-274).

[0459] One major type of liposomal composition includes phospholipids other than naturally-derived phosphatidylcholine. Neutral liposome compositions, for example, can be formed from dimyristoyl phosphatidylcholine (DMPC) or dipalmitoyl phosphatidylcholine (DPPC). Anionic liposome compositions generally are formed from dimyristoyl phosphatidylglycerol, while anionic fusogenic liposomes are formed primarily from dioleoyl phosphatidylethanolamine (DOPE). Another type of liposomal composition is formed from phosphatidylcholine (PC) such as, for example, soybean PC, and egg PC. Another type is formed from mixtures of phospholipid and/or phosphatidylcholine and/or cholesterol.

[0460] Examples of other methods to introduce liposomes into cells in vitro and in vivo include U.S. Pat. Nos. 5,283,185; 5,171,678; WO 94/00569; WO 93/24640; WO 91/16024; Felgner, J. Biol. Chem. 269:2550, 1994; Nabel, Proc. Natl. Acad. Sci. 90:11307, 1993; Nabel, Human Gene Ther. 3:649, 1992; Gershon, Biochem. 32:7143, 1993; and Strauss EMBO J. 11:417, 1992.

[0461] Non-ionic liposomal systems have also been examined to determine their utility in the delivery of drugs to the skin, in particular systems comprising non-ionic surfactant and cholesterol. Non-ionic liposomal formulations comprising Novasome™ I (glyceryl dilaurate/cholesterol/polyoxyethylene-10-stearyl ether) and Novasome™ II (glyceryl distearate/cholesterol/polyoxyethylene-10-stearyl ether) were used to deliver cyclosporin-A into the dermis of mouse skin. Results indicated that such non-ionic liposomal systems were effective in facilitating the deposition of cyclosporine A into different layers of the skin (Hu et al. S.T.P.Pharma. Sci., 1994, 4(6) 466).

[0462] Liposomes also include “sterically stabilized” liposomes, a term which, as used herein, refers to liposomes comprising one or more specialized lipids that, when incorporated into liposomes, result in enhanced circulation lifetimes relative to liposomes lacking such specialized lipids. Examples of sterically stabilized liposomes are those in which part of the vesicle-forming lipid portion of the liposome (A) comprises one or more glycolipids, such as monosialoganglioside G_{M1}, or (B) is derivatized with one or more hydrophilic polymers, such as a polyethylene glycol (PEG) moiety. While not wishing to be bound by any particular theory, it is thought in the art that, at least for sterically stabilized liposomes containing gangliosides, sphingomyelin, or PEG-derivatized lipids, the enhanced circulation half-life of these sterically stabilized liposomes derives from a reduced uptake into cells of the reticuloendothelial system (RES) (Allen et al., FEBS Letters, 1987, 223, 42; Wu et al., Cancer Research, 1993, 53, 3765).

[0463] Various liposomes comprising one or more glycolipids are known in the art. Papahadjopoulos et al. (Ann. N.Y. Acad. Sci., 1987, 507, 64) reported the ability of monosialoganglioside G_{M1}, galactocerebroside sulfate and phosphatidylinositol to improve blood half-lives of liposomes. These findings were expounded upon by Gabizon et al. (Proc. Natl. Acad. Sci. U.S.A., 1988, 85, 6949). U.S. Pat. No. 4,837,028 and WO 88/04924, both to Allen et al., disclose liposomes comprising (1) sphingomyelin and (2) the ganglioside G_{M1} or a galactocerebroside sulfate ester. U.S. Pat. No. 5,543,152 (Webb et al.) discloses liposomes comprising sphingomyelin. Liposomes comprising 1,2-sn-dimyristoylphosphatidylcholine are disclosed in WO 97/13499 (Lim et al).

[0464] In one embodiment, cationic liposomes are used. Cationic liposomes possess the advantage of being able to fuse to the cell membrane. Non-cationic liposomes, although not able to fuse as efficiently with the plasma membrane, are taken up by macrophages in vivo and can be used to deliver RNAi agents to macrophages.

[0465] Further advantages of liposomes include: liposomes obtained from natural phospholipids are biocompatible and biodegradable; liposomes can incorporate a wide range of water and lipid soluble drugs; liposomes can protect encapsulated RNAi agents in their internal compartments from metabolism and degradation (Rosoff, in “Pharmaceutical Dosage Forms,” Lieberman, Rieger and Banker (Eds.), 1988, volume 1, p. 245). Important considerations in the preparation of liposome formulations are the lipid surface charge, vesicle size and the aqueous volume of the liposomes.

[0466] A positively charged synthetic cationic lipid, N-[1-(2,3-dioleyloxy)propyl]-N,N,N-trimethylammonium chloride (DOTMA) can be used to form small liposomes that interact spontaneously with nucleic acid to form lipid-nucleic acid complexes which are capable of fusing with the negatively charged lipids of the cell membranes of tissue culture cells, resulting in delivery of RNAi agent (see, e.g., Felgner, P. L. et al., Proc. Natl. Acad. Sci., USA 8:7413-7417, 1987 and U.S. Pat. No. 4,897,355 for a description of DOTMA and its use with DNA).

[0467] A DOTMA analogue, 1,2-bis(oleoyloxy)-3-(trimethylammonia)propane (DOTAP) can be used in combination with a phospholipid to form DNA-complexing vesicles. Lipofectin™ Bethesda Research Laboratories, Gaithersburg, Md.) is an effective agent for the delivery of highly anionic nucleic acids into living tissue culture cells that comprise positively charged DOTMA liposomes which interact spontaneously with negatively charged polynucleotides to form complexes. When enough positively charged liposomes are used, the net charge on the resulting complexes is also positive. Positively charged complexes prepared in this way spontaneously attach to negatively charged cell surfaces, fuse with the plasma membrane, and efficiently deliver functional nucleic acids into, for example, tissue culture cells. Another commercially available cationic lipid, 1,2-bis(oleoyloxy)-3,3-(trimethylammonia)propane (“DOTAP”) (Boehringer Mannheim, Indianapolis, Ind.) differs from DOTMA in that the oleoyl moieties are linked by ester, rather than ether linkages.

[0468] Other reported cationic lipid compounds include those that have been conjugated to a variety of moieties including, for example, carboxyspermine which has been conjugated to one of two types of lipids and includes compounds such as 5-carboxyspermylglycine dioctaoleoylamide (“DOGS”) (Transfectam™, Promega, Madison, Wis.) and dipalmitoylphosphatidylethanolamine 5-carboxyspermyl-amide (“DPPES”) (see, e.g., U.S. Pat. No. 5,171,678).

[0469] Another cationic lipid conjugate includes derivatization of the lipid with cholesterol (“DC-Chol”) which has been formulated into liposomes in combination with DOPE (See, Gao, X. and Huang, L., Biochim. Biophys. Res. Commun. 179:280, 1991). Lipopolylysine, made by conjugating polylysine to DOPE, has been reported to be effective for transfection in the presence of serum (Zhou, X. et al., Biochim. Biophys. Acta 1065:8, 1991). For certain cell lines, these liposomes containing conjugated cationic lipids, are said to exhibit lower toxicity and provide more efficient transfection than the DOTMA-containing compositions. Other commercially available cationic lipid products include DMRIE and DMRIE-HP (Vical, La Jolla, Calif.) and Lipofectamine (DOSPA) (Life Technology, Inc., Gaithersburg, Md.). Other cationic lipids suitable for the delivery of oligonucleotides are described in WO 98/39359 and WO 96/37194.

[0470] Liposomal formulations are particularly suited for topical administration, liposomes present several advantages over other formulations. Such advantages include reduced side effects related to high systemic absorption of the administered drug, increased accumulation of the administered drug at the desired target, and the ability to administer RNAi agent into the skin. In some implementations, liposomes are used for delivering RNAi agent to epidermal cells and also to enhance the penetration of RNAi agent into dermal tissues, e.g., into skin. For example, the liposomes can be applied topically. Topical delivery of drugs formulated as liposomes to the skin has been documented (see, e.g., Weiner et al., Journal of Drug Targeting, 1992, vol. 2, 405-410 and du Plessis et al., Antiviral Research, 18, 1992, 259-265; Mannino, R. J. and Fould-Fogerite, S., Biotechniques 6:682-690, 1988; Itani, T. et al. Gene 56:267-276. 1987; Nicolau, C. et al. Meth. Enz. 149:157-176, 1987; Straubinger, R. M. and Papahadjopoulos, D. Meth. Enz. 101:512-527, 1983; Wang, C. Y. and Huang, L., Proc. Natl. Acad. Sci. USA 84:7851-7855, 1987).

[0471] Non-ionic liposomal systems have also been examined to determine their utility in the delivery of drugs to the skin, in particular systems comprising non-ionic surfactant and cholesterol. Non-ionic liposomal formulations comprising Novasome I (glyceryl dilaurate/cholesterol/polyoxyethylene-10-stearyl ether) and Novasome II (glyceryl distearate/cholesterol/polyoxyethylene-10-stearyl ether) were used to deliver a drug into the dermis of mouse skin. Such formulations with RNAi agent are useful for treating a dermatological disorder.

[0472] Liposomes that include iRNA can be made highly deformable. Such deformability can enable the liposomes to penetrate through pore that are smaller than the average radius of the liposome. For example, transfersomes are a type of deformable liposomes. Transferosomes can be made by adding surface edge activators, usually surfactants, to a standard liposomal composition. Transfersomes that include RNAi agent can be delivered, for example, subcutaneously by infection in order to deliver RNAi agent to keratinocytes in the skin. In order to cross intact mammalian skin, lipid vesicles must pass through a series of fine pores, each with a diameter less than 50 nm, under the influence of a suitable transdermal gradient. In addition, due to the lipid properties, these transferosomes can be self-optimizing (adaptive to the shape of pores, e.g., in the skin), self-repairing, and can frequently reach their targets without fragmenting, and often self-loading.

[0473] Other formulations amenable to the present invention are described in U.S. provisional application Ser. No. 61/018,616, filed Jan. 2, 2008; 61/018,611, filed Jan. 2, 2008; 61/039,748, filed Mar. 26, 2008; 61/047,087, filed Apr. 22, 2008 and 61/051,528, filed May 8, 2008. PCT application no PCT/US2007/080331, filed Oct. 3, 2007 also describes formulations that are amenable to the present invention.

[0474] Transfersomes are yet another type of liposomes, and are highly deformable lipid aggregates which are attractive candidates for drug delivery vehicles. Transfersomes can be described as lipid droplets which are so highly deformable that they are easily able to penetrate through pores which are smaller than the droplet. Transfersomes are adaptable to the environment in which they are used, e.g., they are self-optimizing (adaptive to the shape of pores in the skin), self-repairing, frequently reach their targets without fragmenting, and often self-loading. To make transfersomes it is possible to add surface edge-activators, usually surfactants, to a standard liposomal composition. Transfersomes have been used to deliver serum albumin to the skin. The transfersome-mediated delivery of serum albumin has been shown to be as effective as subcutaneous injection of a solution containing serum albumin.

[0475] Surfactants find wide application in formulations such as emulsions (including microemulsions) and liposomes. The most common way of classifying and ranking the properties of the many different types of surfactants, both natural and synthetic, is by the use of the hydrophile/lipophile balance (HLB). The nature of the hydrophilic group (also known as the “head”) provides the most useful means for categorizing the different surfactants used in formulations (Rieger, in “Pharmaceutical Dosage Forms”, Marcel Dekker, Inc., New York, N.Y., 1988, p. 285).

[0476] If the surfactant molecule is not ionized, it is classified as a nonionic surfactant. Nonionic surfactants find wide application in pharmaceutical and cosmetic products and are usable over a wide range of pH values. In general their HLB values range from 2 to about 18 depending on their structure. Nonionic surfactants include nonionic esters such as ethylene glycol esters, propylene glycol esters, glyceryl esters, polyglyceryl esters, sorbitan esters, sucrose esters, and ethoxylated esters. Nonionic alkanolamides and ethers such as fatty alcohol ethoxylates, propoxylated alcohols, and ethoxylated/propoxylated block polymers are also included in this class. The polyoxyethylene surfactants are the most popular members of the nonionic surfactant class.

[0477] If the surfactant molecule carries a negative charge when it is dissolved or dispersed in water, the surfactant is classified as anionic. Anionic surfactants include carboxylates such as soaps, acyl lactylates, acyl amides of amino acids, esters of sulfuric acid such as alkyl sulfates and ethoxylated alkyl sulfates, sulfonates such as alkyl benzene sulfonates, acyl isethionates, acyl taurates and sulfosuccinates, and phosphates. The most important members of the anionic surfactant class are the alkyl sulfates and the soaps.

[0478] If the surfactant molecule carries a positive charge when it is dissolved or dispersed in water, the surfactant is classified as cationic. Cationic surfactants include quaternary ammonium salts and ethoxylated amines. The quaternary ammonium salts are the most used members of this class.

[0479] If the surfactant molecule has the ability to carry either a positive or negative charge, the surfactant is classified as amphoteric. Amphoteric surfactants include acrylic acid derivatives, substituted alkylamides, N-alkylbetaines and phosphatides.

[0480] The use of surfactants in drug products, formulations and in emulsions has been reviewed (Rieger, in “Pharmaceutical Dosage Forms”, Marcel Dekker, Inc., New York, N.Y., 1988, p. 285).

[0481] The iRNA for use in the methods of the invention can also be provided as micellar formulations. “Micelles” are defined herein as a particular type of molecular assembly in which amphipathic molecules are arranged in a spherical structure such that all the hydrophobic portions of the molecules are directed inward, leaving the hydrophilic portions in contact with the surrounding aqueous phase. The converse arrangement exists if the environment is hydrophobic.

[0482] A mixed micellar formulation suitable for delivery through transdermal membranes may be prepared by mixing an aqueous solution of the siRNA composition, an alkali metal C₈ to C₂₂ alkyl sulphate, and a micelle forming compounds. Exemplary micelle forming compounds include lecithin, hyaluronic acid, pharmaceutically acceptable salts of hyaluronic acid, glycolic acid, lactic acid, chamomile extract, cucumber extract, oleic acid, linoleic acid, linolenic acid, monoolein, monooleates, monolaurates, borage oil, evening of primrose oil, menthol, trihydroxy oxo cholanyl glycine and pharmaceutically acceptable salts thereof, glycerin, polyglycerin, lysine, polylysine, triolein, polyoxyethylene ethers and analogues thereof, polidocanol alkyl ethers and analogues thereof, chenodeoxycholate, deoxycholate, and mixtures thereof. The micelle forming compounds may be added at the same time or after addition of the alkali metal alkyl sulphate. Mixed micelles will form with substantially any kind of mixing of the ingredients but vigorous mixing in order to provide smaller size micelles.

[0483] In one method a first micellar composition is prepared which contains the siRNA composition and at least the alkali metal alkyl sulphate. The first micellar composition is then mixed with at least three micelle forming compounds to form a mixed micellar composition. In another method, the micellar composition is prepared by mixing the siRNA composition, the alkali metal alkyl sulphate and at least one of the micelle forming compounds, followed by addition of the remaining micelle forming compounds, with vigorous mixing.

[0484] Phenol and/or m-cresol may be added to the mixed micellar composition to stabilize the formulation and protect against bacterial growth. Alternatively, phenol and/or m-cresol may be added with the micelle forming ingredients. An isotonic agent such as glycerin may also be added after formation of the mixed micellar composition.

[0485] For delivery of the micellar formulation as a spray, the formulation can be put into an aerosol dispenser and the dispenser is charged with a propellant. The propellant, which is under pressure, is in liquid form in the dispenser. The ratios of the ingredients are adjusted so that the aqueous and propellant phases become one, i.e., there is one phase. If there are two phases, it is necessary to shake the dispenser prior to dispensing a portion of the contents, e.g., through a metered valve. The dispensed dose of pharmaceutical agent is propelled from the metered valve in a fine spray.

[0486] Propellants may include hydrogen-containing chlorofluorocarbons, hydrogen-containing fluorocarbons, dimethyl ether and diethyl ether. In certain embodiments, HFA 134a (1,1,1,2 tetrafluoroethane) may be used.

[0487] The specific concentrations of the essential ingredients can be determined by relatively straightforward experimentation. For absorption through the oral cavities, it is often desirable to increase, e.g., at least double or triple, the dosage for through injection or administration through the gastrointestinal tract.

[0488] B. Lipid Particles

[0489] iRNAs, e.g., dsRNAs of in the invention may be fully encapsulated in a lipid formulation, e.g., a LNP, or other nucleic acid-lipid particle.

[0490] As used herein, the term “LNP” refers to a stable nucleic acid-lipid particle. LNPs typically contain a cationic lipid, a non-cationic lipid, and a lipid that prevents aggregation of the particle (e.g., a PEG-lipid conjugate). LNPs are extremely useful for systemic applications, as they exhibit extended circulation lifetimes following intravenous (i.v.) injection and accumulate at distal sites (e.g., sites physically separated from the administration site). LNPs include “pSPLP,” which include an encapsulated condensing agent-nucleic acid complex as set forth in PCT Publication No. WO 00/03683. The particles of the present invention typically have a mean diameter of about 50 nm to about 150 nm, more typically about 60 nm to about 130 nm, more typically about 70 nm to about 110 nm, most typically about 70 nm to about 90 nm, and are substantially nontoxic. In addition, the nucleic acids when present in the nucleic acid-lipid particles of the present invention are resistant in aqueous solution to degradation with a nuclease. Nucleic acid-lipid particles and their method of preparation are disclosed in, e.g., U.S. Pat. Nos. 5,976,567; 5,981,501; 6,534,484; 6,586,410; 6,815,432; U.S. Publication No. 2010/0324120 and PCT Publication No. WO 96/40964.

[0491] In one embodiment, the lipid to drug ratio (mass/mass ratio) (e.g., lipid to dsRNA ratio) will be in the range of from about 1:1 to about 50:1, from about 1:1 to about 25:1, from about 3:1 to about 15:1, from about 4:1 to about 10:1, from about 5:1 to about 9:1, or about 6:1 to about 9:1. Ranges intermediate to the above recited ranges are also contemplated to be part of the invention.

[0492] The cationic lipid can be, for example, N,N-dioleyl-N,N-dimethylammonium chloride (DODAC), N,N-distearyl-N,N-dimethylammonium bromide (DDAB), N-(I-(2,3-dioleoyloxy)propyl)-N,N,N-trimethylammonium chloride (DOTAP), N-(I-(2,3-dioleyloxy)propyl)-N,N,N-trimethylammonium chloride (DOTMA), N,N-dimethyl-2,3-dioleyloxy)propylamine (DODMA), 1,2-DiLinoleyloxy-N,N-dimethylaminopropane (DLinDMA), 1,2-Dilinolenyloxy-N,N-dimethylaminopropane (DLenDMA), 1,2-Dilinoleylcarbamoyloxy-3-dimethylaminopropane (DLin-C-DAP), 1,2-Dilinoleyoxy-3-(dimethylamino)acetoxypropane (DLin-DAC), 1,2-Dilinoleyoxy-3-morpholinopropane (DLin-MA), 1,2-Dilinoleoyl-3-dimethylaminopropane (DLinDAP), 1,2-Dilinoleylthio-3-dimethylaminopropane (DLin-S-DMA), 1-Linoleoyl-2-linoleyloxy-3-dimethylaminopropane (DLin-2-DMAP), 1,2-Dilinoleyloxy-3-trimethylaminopropane chloride salt (DLin-TMA.Cl), 1,2-Dilinoleoyl-3-trimethylaminopropane chloride salt (DLin-TAP.Cl), 1,2-Dilinoleyloxy-3-(N-methylpiperazino)propane (DLin-MPZ), or 3-(N,N-Dilinoleylamino)-1,2-propanediol (DLinAP), 3-(N,N-Dioleylamino)-1,2-propanedio (DOAP), 1,2-Dilinoleyloxo-3-(2-N,N-dimethylamino)ethoxypropane (DLin-EG-DMA), 1,2-Dilinolenyloxy-N,N-dimethylaminopropane (DLinDMA), 2,2-Dilinoleyl-4-dimethylaminomethyl-[1,3]-dioxolane (DLin-K-DMA) or analogs thereof, (3aR,5s,6aS)—N,N-dimethyl-2,2-di((9Z,12Z)-octadeca-9,12-dienyl)tetrahydro-3aH-cyclopenta[d][1,3]dioxol-5-amine (ALN100), (6Z,9Z,28Z,31Z)-heptatriaconta-6,9,28,31-tetraen-19-yl 4-(dimethylamino)butanoate (MC3), 1,1′-(2-(4-(2-((2-(bis(2-hydroxydodecyl)amino)ethyl)(2-hydroxydodecyl)amino)ethyl)piperazin-1-yl)ethylazanediyl)didodecan-2-ol (Tech G1), or a mixture thereof. The cationic lipid can comprise from about 20 mol % to about 50 mol % or about 40 mol % of the total lipid present in the particle.

[0493] In another embodiment, the compound 2,2-Dilinoleyl-4-dimethylaminoethyl-[1,3]-dioxolane can be used to prepare lipid-siRNA nanoparticles. Synthesis of 2,2-Dilinoleyl-4-dimethylaminoethyl-[1,3]-dioxolane is described in U.S. provisional patent application No. 61/107,998 filed on Oct. 23, 2008, which is herein incorporated by reference.

[0494] In one embodiment, the lipid-siRNA particle includes 40% 2, 2-Dilinoleyl-4-dimethylaminoethyl-[1,3]-dioxolane: 10% DSPC: 40% Cholesterol: 10% PEG-C-DOMG (mole percent) with a particle size of 63.0±20 nm and a 0.027 siRNA/Lipid Ratio.

[0495] The ionizable/non-cationic lipid can be an anionic lipid or a neutral lipid including, but not limited to, distearoylphosphatidylcholine (DSPC), dioleoylphosphatidylcholine (DOPC), dipalmitoylphosphatidylcholine (DPPC), dioleoylphosphatidylglycerol (DOPG), dipalmitoylphosphatidylglycerol (DPPG), dioleoyl-phosphatidylethanolamine (DOPE), palmitoyloleoylphosphatidylcholine (POPC), palmitoyloleoylphosphatidylethanolamine (POPE), dioleoyl-phosphatidylethanolamine 4-(N-maleimidomethyl)-cyclohexane-1-carboxylate (DOPE-mal), dipalmitoyl phosphatidyl ethanolamine (DPPE), dimyristoylphosphoethanolamine (DMPE), distearoyl-phosphatidyl-ethanolamine (DSPE), 16-O-monomethyl PE, 16-O-dimethyl PE, 18-1-trans PE, 1-stearoyl-2-oleoyl-phosphatidyethanolamine (SOPE), cholesterol, or a mixture thereof. The non-cationic lipid can be from about 5 mol % to about 90 mol %, about 10 mol %, or about 58 mol % if cholesterol is included, of the total lipid present in the particle.

[0496] The conjugated lipid that inhibits aggregation of particles can be, for example, a polyethyleneglycol (PEG)-lipid including, without limitation, a PEG-diacylglycerol (DAG), a PEG-dialkyloxypropyl (DAA), a PEG-phospholipid, a PEG-ceramide (Cer), or a mixture thereof. The PEG-DAA conjugate can be, for example, a PEG-dilauryloxypropyl (Ci₂), a PEG-dimyristyloxypropyl (Ci₄), a PEG-dipalmityloxypropyl (Ci₆), or a PEG-distearyloxypropyl (C]₈). The conjugated lipid that prevents aggregation of particles can be from 0 mol % to about 20 mol % or about 2 mol % of the total lipid present in the particle.

[0497] In some embodiments, the nucleic acid-lipid particle further includes cholesterol at, e.g., about 10 mol % to about 60 mol % or about 48 mol % of the total lipid present in the particle.

[0498] In one embodiment, the lipidoid ND98⋅4HCl (MW 1487) (see U.S. patent application Ser. No. 12/056,230, filed Mar. 26, 2008, which is incorporated herein by reference), Cholesterol (Sigma-Aldrich), and PEG-Ceramide C16 (Avanti Polar Lipids) can be used to prepare lipid-dsRNA nanoparticles (i.e., LNP01 particles). Stock solutions of each in ethanol can be prepared as follows: ND98, 133 mg/ml; Cholesterol, 25 mg/ml, PEG-Ceramide C16, 100 mg/ml. The ND98, Cholesterol, and PEG-Ceramide C16 stock solutions can then be combined in a, e.g., 42:48:10 molar ratio. The combined lipid solution can be mixed with aqueous dsRNA (e.g., in sodium acetate pH 5) such that the final ethanol concentration is about 35-45% and the final sodium acetate concentration is about 100-300 mM. Lipid-dsRNA nanoparticles typically form spontaneously upon mixing. Depending on the desired particle size distribution, the resultant nanoparticle mixture can be extruded through a polycarbonate membrane (e.g., 100 nm cut-off) using, for example, a thermobarrel extruder, such as Lipex Extruder (Northern Lipids, Inc). In some cases, the extrusion step can be omitted. Ethanol removal and simultaneous buffer exchange can be accomplished by, for example, dialysis or tangential flow filtration. Buffer can be exchanged with, for example, phosphate buffered saline (PBS) at about pH 7, e.g., about pH 6.9, about pH 7.0, about pH 7.1, about pH 7.2, about pH 7.3, or about pH 7.4.

[chemical structure]

[0499] LNP01 formulations are described, e.g., in International Application Publication No. WO 2008/042973, which is hereby incorporated by reference.

[0500] Additional exemplary lipid-dsRNA formulations are described in Table 1.

TABLE 1

| | | cationic lipid/non-cationic |
|---|---|---|
| | | lipid/cholesterol/PEG-lipid conjugate |
| | Ionizable/Cationic Lipid | Lipid:siRNA ratio |
| SNALP-1 | 1,2-Dilinolenyloxy-N,N-dimethylaminopropane | DLinDMA/DPPC/Cholesterol/PEG-cDMA |
| | (DLinDMA) | (57.1/7.1/34.4/1.4) |
| | | lipid:siRNA~7:1 |
| 2-XTC | 2,2-Dilinoleyl-4-dimethylaminoethyl-[1,3]- | XTC/DPPC/Cholesterol/PEG-cDMA |
| | dioxolane (XTC) | 57.1/7.1/34.4/1.4 |
| | | lipid:siRNA~7:1 |
| LNP05 | 2,2-Dilinoleyl-4-dimethylaminoethyl-[1,3]- | XTC/DSPC/Cholesterol/PEG-DMG |
| | dioxolane (XTC) | 57.5/7.5/31.5/3.5 |
| | | lipid:siRNA~6:1 |
| LNP06 | 2,2-Dilinoleyl-4-dimethylaminoethyl-[1,3]- | XTC/DSPC/Cholesterol/PEG-DMG |
| | dioxolane (XTC) | 57.5/7.5/31.5/3.5 |
| | | lipid:siRNA~11:1 |
| LNP07 | 2,2-Dilinoleyl-4-dimethylaminoethyl-[1,3]- | XTC/DSPC/Cholesterol/PEG-DMG |
| | dioxolane (XTC) | 60/7.5/31/1.5, |
| | | lipid:siRNA~6:1 |
| LNP08 | 2,2-Dilinoleyl-4-dimethylaminoethyl-[1,3]- | XTC/DSPC/Cholesterol/PEG-DMG |
| | dioxolane (XTC) | 60/7.5/31/1.5, |
| | | lipid:siRNA~11:1 |
| LNP09 | 2,2-Dilinoleyl-4-dimethylaminoethyl-[1,3]- | XTC/DSPC/Cholesterol/PEG-DMG |
| | dioxolane (XTC) | 50/10/38.5/1.5 |
| | | Lipid:siRNA 10:1 |
| LNP10 | (3aR,5s,6aS)-N,N-dimethyl-2,2-di((9Z,12Z)- | ALN100/DSPC/Cholesterol/PEG-DMG |
| | octadeca-9,12-dienyl)tetrahydro-3aH- | 50/10/38.5/1.5 |
| | cyclopenta[d][1,3]dioxol-5-amine (ALN100) | Lipid:siRNA 10:1 |
| LNP11 | (6Z,9Z,28Z,31Z)-heptatriaconta-6,9,28,31- | MC-3/DSPC/Cholesterol/PEG-DMG |
| | tetraen-19-yl 4-(dimethylamino)butanoate | 50/10/38.5/1.5 |
| | (MC3) | Lipid:siRNA 10:1 |
| LNP12 | 1,1′-(2-(4-(2-((2-(bis(2- | Tech G1/DSPC/Cholesterol/PEG-DMG |
| | hydroxydodecyl)amino)ethyl)(2- | 50/10/38.5/1.5 |
| | hydroxydodecyl)amino)ethyl)piperazin-1- | Lipid:siRNA 10:1 |
| | yl)ethylazanediyl)didodecan-2-ol (Tech G1) | |
| LNP13 | XTC | XTC/DSPC/Chol/PEG-DMG |
| | | 50/10/38.5/1.5 |
| | | Lipid:siRNA: 33:1 |
| LNP14 | MC3 | MC3/DSPC/Chol/PEG-DMG |
| | | 40/15/40/5 |
| | | Lipid:siRNA: 11:1 |
| LNP15 | MC3 | MC3/DSPC/Chol/PEG-DSG/GalNAc-PEG-DSG |
| | | 50/10/35/4.5/0.5 |
| | | Lipid:siRNA: 11:1 |
| LNP16 | MC3 | MC3/DSPC/Chol/PEG-DMG |
| | | 50/10/38.5/1.5 |
| | | Lipid:siRNA: 7:1 |
| LNP17 | MC3 | MC3/DSPC/Chol/PEG-DSG |
| | | 50/10/38.5/1.5 |
| | | Lipid:siRNA: 10:1 |
| LNP18 | MC3 | MC3/DSPC/Chol/PEG-DMG |
| | | 50/10/38.5/1.5 |
| | | Lipid:siRNA: 12:1 |
| LNP19 | MC3 | MC3/DSPC/Chol/PEG-DMG |
| | | 50/10/35/5 |
| | | Lipid:siRNA: 8:1 |
| LNP20 | MC3 | MC3/DSPC/Chol/PEG-DPG |
| | | 50/10/38.5/1.5 |
| | | Lipid:siRNA: 10:1 |
| LNP21 | C12-200 | C12-200/DSPC/Chol/PEG-DSG |
| | | 50/10/38.5/1.5 |
| | | Lipid:siRNA: 7:1 |
| LNP22 | XTC | XTC/DSPC/Chol/PEG-DSG |
| | | 50/10/38.5/1.5 |
| | | Lipid:siRNA: 10:1 |

DSPC: distearoylphosphatidylcholine
DPPC: dipalmitoylphosphatidylcholine
PEG-DMG: PEG-didimyristoyl glycerol (C14-PEG, or PEG-C14) (PEG with avg mol wt of 2000)
PEG-DSG: PEG-distyryl glycerol (C18-PEG, or PEG-C18) (PEG with avg mol wt of 2000)
PEG-cDMA: PEG-carbamoyl-1,2-dimyristyloxypropylamine (PEG with avg mol wt of 2000)
SNALP (1,2-Dilinolenyloxy-N,N-dimethylaminopropane (DLinDMA)) comprising formulations are described in International Publication No. WO2009/127060, filed Apr. 15, 2009, which is hereby incorporated by reference.

[0501] XTC comprising formulations are described, e.g., in U.S. Provisional Ser. No. 61/148,366, filed Jan. 29, 2009; U.S. Provisional Ser. No. 61/156,851, filed Mar. 2, 2009; U.S. Provisional Serial No. filed Jun. 10, 2009; U.S. Provisional Ser. No. 61/228,373, filed Jul. 24, 2009; U.S. Provisional Ser. No. 61/239,686, filed Sep. 3, 2009, and International Application No. PCT/US2010/022614, filed Jan. 29, 2010, which are hereby incorporated by reference.

[0502] MC3 comprising formulations are described, e.g., in U.S. Publication No. 2010/0324120, filed Jun. 10, 2010, the entire contents of which are hereby incorporated by reference.

[0503] ALNY-100 comprising formulations are described, e.g., International patent application number PCT/US09/63933, filed on Nov. 10, 2009, which is hereby incorporated by reference.

[0504] C12-200 comprising formulations are described in U.S. Provisional Ser. No. 61/175,770, filed May 5, 2009 and International Application No. PCT/US10/33777, filed May 5, 2010, which are hereby incorporated by reference.

### Synthesis of Ionizable/Cationic Lipids

[0505] Any of the compounds, e.g., cationic lipids and the like, used in the nucleic acid-lipid particles of the invention can be prepared by known organic synthesis techniques, including the methods described in more detail in the Examples. All substituents are as defined below unless indicated otherwise.

[0506] “Alkyl” means a straight chain or branched, noncyclic or cyclic, saturated aliphatic hydrocarbon containing from 1 to 24 carbon atoms. Representative saturated straight chain alkyls include methyl, ethyl, n-propyl, n-butyl, n-pentyl, n-hexyl, and the like; while saturated branched alkyls include isopropyl, sec-butyl, isobutyl, tert-butyl, isopentyl, and the like. Representative saturated cyclic alkyls include cyclopropyl, cyclobutyl, cyclopentyl, cyclohexyl, and the like; while unsaturated cyclic alkyls include cyclopentenyl and cyclohexenyl, and the like.

[0507] “Alkenyl” means an alkyl, as defined above, containing at least one double bond between adjacent carbon atoms. Alkenyls include both cis and trans isomers. Representative straight chain and branched alkenyls include ethylenyl, propylenyl, 1-butenyl, 2-butenyl, isobutylenyl, 1-pentenyl, 2-pentenyl, 3-methyl-1-butenyl, 2-methyl-2-butenyl, 2,3-dimethyl-2-butenyl, and the like.

[0508] “Alkynyl” means any alkyl or alkenyl, as defined above, which additionally contains at least one triple bond between adjacent carbons. Representative straight chain and branched alkynyls include acetylenyl, propynyl, 1-butynyl, 2-butynyl, 1-pentynyl, 2-pentynyl, 3-methyl-1 butynyl, and the like.

[0509] “Acyl” means any alkyl, alkenyl, or alkynyl wherein the carbon at the point of attachment is substituted with an oxo group, as defined below. For example, —C(═O)alkyl, —C(═O)alkenyl, and —C(═O)alkynyl are acyl groups.

[0510] “Heterocycle” means a 5- to 7-membered monocyclic, or 7- to 10-membered bicyclic, heterocyclic ring which is either saturated, unsaturated, or aromatic, and which contains from 1 or 2 heteroatoms independently selected from nitrogen, oxygen and sulfur, and wherein the nitrogen and sulfur heteroatoms can be optionally oxidized, and the nitrogen heteroatom can be optionally quaternized, including bicyclic rings in which any of the above heterocycles are fused to a benzene ring. The heterocycle can be attached via any heteroatom or carbon atom. Heterocycles include heteroaryls as defined below. Heterocycles include morpholinyl, pyrrolidinonyl, pyrrolidinyl, piperidinyl, piperizynyl, hydantoinyl, valerolactamyl, oxiranyl, oxetanyl, tetrahydrofuranyl, tetrahydropyranyl, tetrahydropyridinyl, tetrahydroprimidinyl, tetrahydrothiophenyl, tetrahydrothiopyranyl, tetrahydropyrimidinyl, tetrahydrothiophenyl, tetrahydrothiopyranyl, and the like.

[0511] The terms “optionally substituted alkyl”, “optionally substituted alkenyl”, “optionally substituted alkynyl”, “optionally substituted acyl”, and “optionally substituted heterocycle” means that, when substituted, at least one hydrogen atom is replaced with a substituent. In the case of an oxo substituent (═O) two hydrogen atoms are replaced. In this regard, substituents include oxo, halogen, heterocycle, —CN, —ORx, —NRxRy, —NRxC(═O)Ry, —NRxSO2Ry, —C(═O)Rx, —C(═O)ORx, —C(═O)NRxRy, —SOnRx and —SOnNRxRy, wherein n is 0, 1 or 2, Rx and Ry are the same or different and independently hydrogen, alkyl or heterocycle, and each of said alkyl and heterocycle substituents can be further substituted with one or more of oxo, halogen, —OH, —CN, alkyl, —ORx, heterocycle, —NRxRy, —NRxC(═O)Ry, —NRxSO2Ry, —C(═O)Rx, —C(═O)ORx, —C(═O)NRxRy, —SOnRx and —SOnNRxRy.

[0512] “Halogen” means fluoro, chloro, bromo and iodo.

[0513] In some embodiments, the methods of the invention can require the use of protecting groups. Protecting group methodology is well known to those skilled in the art (see, for example, Protective Groups in Organic Synthesis, Green, T. W. et al., Wiley-Interscience, New York City, 1999). Briefly, protecting groups within the context of this invention are any group that reduces or eliminates unwanted reactivity of a functional group. A protecting group can be added to a functional group to mask its reactivity during certain reactions and then removed to reveal the original functional group. In some embodiments an “alcohol protecting group” is used. An “alcohol protecting group” is any group which decreases or eliminates unwanted reactivity of an alcohol functional group. Protecting groups can be added and removed using techniques well known in the art.

### Synthesis of Formula A

[0514] In some embodiments, nucleic acid-lipid particles of the invention are formulated using a cationic lipid of formula A:

[chemical structure]

where R1 and R2 are independently alkyl, alkenyl or alkynyl, each can be optionally substituted, and R3 and R4 are independently lower alkyl or R3 and R4 can be taken together to form an optionally substituted heterocyclic ring. In some embodiments, the cationic lipid is XTC (2,2-Dilinoleyl-4-dimethylaminoethyl-[1,3]-dioxolane). In general, the lipid of formula A above can be made by the following Reaction Schemes 1 or 2, wherein all substituents are as defined above unless indicated otherwise.

[chemical structure]

Lipid A, where R1 and R2 are independently alkyl, alkenyl or alkynyl, each can be optionally substituted, and R3 and R4 are independently lower alkyl or R3 and R4 can be taken together to form an optionally substituted heterocyclic ring, can be prepared according to Scheme 1. Ketone 1 and bromide 2 can be purchased or prepared according to methods known to those of ordinary skill in the art. Reaction of 1 and 2 yields ketal 3. Treatment of ketal 3 with amine 4 yields lipids of formula A. The lipids of formula A can be converted to the corresponding ammonium salt with an organic salt of formula 5, where X is anion counter ion selected from halogen, hydroxide, phosphate, sulfate, or the like.

[chemical structure]

Alternatively, the ketone 1 starting material can be prepared according to Scheme 2. Grignard reagent 6 and cyanide 7 can be purchased or prepared according to methods known to those of ordinary skill in the art. Reaction of 6 and 7 yields ketone 1. Conversion of ketone 1 to the corresponding lipids of formula A is as described in Scheme 1.

### Synthesis of MC3

[0515] Preparation of DLin-M-C3-DMA (i.e., (6Z,9Z,28Z,31Z)-heptatriaconta-6,9,28,31-tetraen-19-yl 4-(dimethylamino)butanoate) was as follows. A solution of (6Z,9Z,28Z,31Z)-heptatriaconta-6,9,28,31-tetraen-19-ol (0.53 g), 4-N,N-dimethylaminobutyric acid hydrochloride (0.51 g), 4-N,N-dimethylaminopyridine (0.61 g) and 1-ethyl-3-(3-dimethylaminopropyl)carbodiimide hydrochloride (0.53 g) in dichloromethane (5 mL) was stirred at room temperature overnight. The solution was washed with dilute hydrochloric acid followed by dilute aqueous sodium bicarbonate. The organic fractions were dried over anhydrous magnesium sulphate, filtered and the solvent removed on a rotovap. The residue was passed down a silica gel column (20 g) using a 1-5% methanol/dichloromethane elution gradient. Fractions containing the purified product were combined and the solvent removed, yielding a colorless oil (0.54 g). Synthesis of ALNY-100

[0516] Synthesis of ketal 519 [ALNY-100] was performed using the following scheme 3:

[chemical structure]

### Synthesis of 515

[0517] To a stirred suspension of LiAlH4 (3.74 g, 0.09852 mol) in 200 ml anhydrous THF in a two neck RBF (1 L), was added a solution of 514 (10 g, 0.04926 mol) in 70 mL of THF slowly at 0° C. under nitrogen atmosphere. After complete addition, reaction mixture was warmed to room temperature and then heated to reflux for 4 h. Progress of the reaction was monitored by TLC. After completion of reaction (by TLC) the mixture was cooled to 0° C. and quenched with careful addition of saturated Na2SO4 solution. Reaction mixture was stirred for 4 h at room temperature and filtered off. Residue was washed well with THF. The filtrate and washings were mixed and diluted with 400 mL dioxane and 26 mL conc. HCl and stirred for 20 minutes at room temperature. The volatilities were stripped off under vacuum to furnish the hydrochloride salt of 515 as a white solid. Yield: 7.12 g 1H-NMR (DMSO, 400 MHz): δ=9.34 (broad, 2H), 5.68 (s, 2H), 3.74 (m, 1H), 2.66-2.60 (m, 2H), 2.50-2.45 (m, 5H).

### Synthesis of 516

[0518] To a stirred solution of compound 515 in 100 mL dry DCM in a 250 mL two neck RBF, was added NEt3 (37.2 mL, 0.2669 mol) and cooled to 0° C. under nitrogen atmosphere. After a slow addition of N-(benzyloxy-carbonyloxy)-succinimide (20 g, 0.08007 mol) in 50 mL dry DCM, reaction mixture was allowed to warm to room temperature. After completion of the reaction (2-3 h by TLC) mixture was washed successively with 1N HCl solution (1×100 mL) and saturated NaHCO₃ solution (1×50 mL). The organic layer was then dried over anhyd. Na2SO4 and the solvent was evaporated to give crude material which was purified by silica gel column chromatography to get 516 as sticky mass. Yield: 11 g (89%). 1H-NMR (CDCl3, 400 MHz): δ=7.36-7.27 (m, 5H), 5.69 (s, 2H), 5.12 (s, 2H), 4.96 (br., 1H) 2.74 (s, 3H), 2.60 (m, 2H), 2.30-2.25 (m, 2H). LC-MS [M+H]-232.3 (96.94%).

### Synthesis of 517A and 517B

[0519] The cyclopentene 516 (5 g, 0.02164 mol) was dissolved in a solution of 220 mL acetone and water (10:1) in a single neck 500 mL RBF and to it was added N-methyl morpholine-N-oxide (7.6 g, 0.06492 mol) followed by 4.2 mL of 7.6% solution of OsO4 (0.275 g, 0.00108 mol) in tert-butanol at room temperature. After completion of the reaction (˜3 h), the mixture was quenched with addition of solid Na2SO3 and resulting mixture was stirred for 1.5 h at room temperature. Reaction mixture was diluted with DCM (300 mL) and washed with water (2×100 mL) followed by saturated NaHCO₃ (1×50 mL) solution, water (1×30 mL) and finally with brine (1×50 mL). Organic phase was dried over an.Na2SO4 and solvent was removed in vacuum. Silica gel column chromatographic purification of the crude material was afforded a mixture of diastereomers, which were separated by prep HPLC.

Yield: −6 g crude

[0520] 517A—Peak-1 (white solid), 5.13 g (96%). 1H-NMR (DMSO, 400 MHz): δ=7.39-7.31 (m, 5H), 5.04 (s, 2H), 4.78-4.73 (m, 1H), 4.48-4.47 (d, 2H), 3.94-3.93 (m, 2H), 2.71 (s, 3H), 1.72-1.67 (m, 4H). LC-MS—[M+H]-266.3, [M+NH4+]−283.5 present, HPLC-97.86%. Stereochemistry confirmed by X-ray.

### Synthesis of 518

[0521] Using a procedure analogous to that described for the synthesis of compound 505, compound 518 (1.2 g, 41%) was obtained as a colorless oil. 1H-NMR (CDCl3, 400 MHz): δ=7.35-7.33 (m, 4H), 7.30-7.27 (m, 1H), 5.37-5.27 (m, 8H), 5.12 (s, 2H), 4.75 (m, 1H), 4.58-4.57 (m, 2H), 2.78-2.74 (m, 7H), 2.06-2.00 (m, 8H), 1.96-1.91 (m, 2H), 1.62 (m, 4H), 1.48 (m, 2H), 1.37-1.25 (br m, 36H), 0.87 (m, 6H). HPLC-98.65%.

### General Procedure for the Synthesis of Compound 519

[0522] A solution of compound 518 (1 eq) in hexane (15 mL) was added in a drop-wise fashion to an ice-cold solution of LAH in THF (1 M, 2 eq). After complete addition, the mixture was heated at 40° C. over 0.5 h then cooled again on an ice bath. The mixture was carefully hydrolyzed with saturated aqueous Na2SO4 then filtered through celite and reduced to an oil. Column chromatography provided the pure 519 (1.3 g, 68%) which was obtained as a colorless oil. 13C NMR δ=130.2, 130.1 (×2), 127.9 (×3), 112.3, 79.3, 64.4, 44.7, 38.3, 35.4, 31.5, 29.9 (×2), 29.7, 29.6 (×2), 29.5 (×3), 29.3 (×2), 27.2 (×3), 25.6, 24.5, 23.3, 226, 14.1; Electrospray MS (+ve): Molecular weight for C44H80NO2 (M+H)+ Calc. 654.6, Found 654.6.

[0523] Formulations prepared by either the standard or extrusion-free method can be characterized in similar manners. For example, formulations are typically characterized by visual inspection. They should be whitish translucent solutions free from aggregates or sediment. Particle size and particle size distribution of lipid-nanoparticles can be measured by light scattering using, for example, a Malvern Zetasizer Nano ZS (Malvern, USA). Particles should be about 20-300 nm, such as 40-100 nm in size. The particle size distribution should be unimodal. The total dsRNA concentration in the formulation, as well as the entrapped fraction, is estimated using a dye exclusion assay. A sample of the formulated dsRNA can be incubated with an RNA-binding dye, such as Ribogreen (Molecular Probes) in the presence or absence of a formulation disrupting surfactant, e.g., 0.5% Triton-X100. The total dsRNA in the formulation can be determined by the signal from the sample containing the surfactant, relative to a standard curve. The entrapped fraction is determined by subtracting the “free” dsRNA content (as measured by the signal in the absence of surfactant) from the total dsRNA content. Percent entrapped dsRNA is typically >85%. For SNALP formulation, the particle size is at least 30 nm, at least 40 nm, at least 50 nm, at least 60 nm, at least 70 nm, at least 80 nm, at least 90 nm, at least 100 nm, at least 110 nm, and at least 120 nm. The suitable range is typically about at least 50 nm to about at least 110 nm, about at least 60 nm to about at least 100 nm, or about at least 80 nm to about at least 90 nm.

[0524] Compositions and formulations for oral administration include powders or granules, microparticulates, nanoparticulates, suspensions or solutions in water or non-aqueous media, capsules, gel capsules, sachets, tablets or minitablets. Thickeners, flavoring agents, diluents, emulsifiers, dispersing aids or binders can be desirable. In some embodiments, oral formulations are those in which dsRNAs featured in the invention are administered in conjunction with one or more penetration enhancer surfactants and chelators. Suitable surfactants include fatty acids and/or esters or salts thereof, bile acids and/or salts thereof. Suitable bile acids/salts include chenodeoxycholic acid (CDCA) and ursodeoxychenodeoxycholic acid (UDCA), cholic acid, dehydrocholic acid, deoxycholic acid, glucholic acid, glycholic acid, glycodeoxycholic acid, taurocholic acid, taurodeoxycholic acid, sodium tauro-24,25-dihydro-fusidate and sodium glycodihydrofusidate. Suitable fatty acids include arachidonic acid, undecanoic acid, oleic acid, lauric acid, caprylic acid, capric acid, myristic acid, palmitic acid, stearic acid, linoleic acid, linolenic acid, dicaprate, tricaprate, monoolein, dilaurin, glyceryl 1-monocaprate, 1-dodecylazacycloheptan-2-one, an acylcarnitine, an acylcholine, or a monoglyceride, a diglyceride or a pharmaceutically acceptable salt thereof (e.g., sodium). In some embodiments, combinations of penetration enhancers are used, for example, fatty acids/salts in combination with bile acids/salts. One exemplary combination is the sodium salt of lauric acid, capric acid and UDCA. Further penetration enhancers include polyoxyethylene-9-lauryl ether, polyoxyethylene-20-cetyl ether. DsRNAs featured in the invention can be delivered orally, in granular form including sprayed dried particles, or complexed to form micro or nanoparticles. DsRNA complexing agents include poly-amino acids; polyimines; polyacrylates; polyalkylacrylates, polyoxethanes, polyalkylcyanoacrylates; cationized gelatins, albumins, starches, acrylates, polyethyleneglycols (PEG) and starches; polyalkylcyanoacrylates; DEAE-derivatized polyimines, pollulans, celluloses and starches. Suitable complexing agents include chitosan, N-trimethylchitosan, poly-L-lysine, polyhistidine, polyornithine, polyspermines, protamine, polyvinylpyridine, polythiodiethylaminomethylethylene P(TDAE), polyaminostyrene (e.g., p-amino), poly(methylcyanoacrylate), poly(ethylcyanoacrylate), poly(butylcyanoacrylate), poly(isobutylcyanoacrylate), poly(isohexylcynaoacrylate), DEAE-methacrylate, DEAE-hexylacrylate, DEAE-acrylamide, DEAE-albumin and DEAE-dextran, polymethylacrylate, polyhexylacrylate, poly(D,L-lactic acid), poly(DL-lactic-co-glycolic acid (PLGA), alginate, and polyethyleneglycol (PEG). Oral formulations for dsRNAs and their preparation are described in detail in U.S. Pat. No. 6,887,906, US Publn. No. 20030027780, and U.S. Pat. No. 6,747,014, each of which is incorporated herein by reference.

[0525] Compositions and formulations for parenteral, intraparenchymal (into the brain), intrathecal, intraventricular or intrahepatic administration can include sterile aqueous solutions which can also contain buffers, diluents and other suitable additives such as, but not limited to, penetration enhancers, carrier compounds and other pharmaceutically acceptable carriers or excipients.

[0526] Pharmaceutical compositions of the present invention include, but are not limited to, solutions, emulsions, and liposome-containing formulations. These compositions can be generated from a variety of components that include, but are not limited to, preformed liquids, self-emulsifying solids and self-emulsifying semisolids. Particularly preferred are formulations that target the liver when treating hepatic disorders such as hepatic carcinoma.

[0527] The pharmaceutical formulations of the present invention, which can conveniently be presented in unit dosage form, can be prepared according to conventional techniques well known in the pharmaceutical industry. Such techniques include the step of bringing into association the active ingredients with the pharmaceutical carrier(s) or excipient(s). In general, the formulations are prepared by uniformly and intimately bringing into association the active ingredients with liquid carriers or finely divided solid carriers or both, and then, if necessary, shaping the product.

[0528] The compositions of the present invention can be formulated into any of many possible dosage forms such as, but not limited to, tablets, capsules, gel capsules, liquid syrups, soft gels, suppositories, and enemas. The compositions of the present invention can also be formulated as suspensions in aqueous, non-aqueous or mixed media. Aqueous suspensions can further contain substances which increase the viscosity of the suspension including, for example, sodium carboxymethylcellulose, sorbitol and/or dextran. The suspension can also contain stabilizers.

[0529] C. Additional Formulations

[0530] i. Emulsions

[0531] The compositions of the present invention can be prepared and formulated as emulsions. Emulsions are typically heterogeneous systems of one liquid dispersed in another in the form of droplets usually exceeding 0.1 μm in diameter (see e.g., Ansel's Pharmaceutical Dosage Forms and Drug Delivery Systems, Allen, L V., Popovich N G., and Ansel H C., 2004, Lippincott Williams & Wilkins (8th ed.), New York, N.Y.; Idson, in Pharmaceutical Dosage Forms, Lieberman, Rieger and Banker (Eds.), 1988, Marcel Dekker, Inc., New York, N.Y., volume 1, p. 199; Rosoff, in Pharmaceutical Dosage Forms, Lieberman, Rieger and Banker (Eds.), 1988, Marcel Dekker, Inc., New York, N.Y., Volume 1, p. 245; Block in Pharmaceutical Dosage Forms, Lieberman, Rieger and Banker (Eds.), 1988, Marcel Dekker, Inc., New York, N.Y., volume 2, p. 335; Higuchi et al., in Remington's Pharmaceutical Sciences, Mack Publishing Co., Easton, Pa., 1985, p. 301). Emulsions are often biphasic systems comprising two immiscible liquid phases intimately mixed and dispersed with each other. In general, emulsions can be of either the water-in-oil (w/o) or the oil-in-water (o/w) variety. When an aqueous phase is finely divided into and dispersed as minute droplets into a bulk oily phase, the resulting composition is called a water-in-oil (w/o) emulsion. Alternatively, when an oily phase is finely divided into and dispersed as minute droplets into a bulk aqueous phase, the resulting composition is called an oil-in-water (o/w) emulsion.

[0532] Emulsions can contain additional components in addition to the dispersed phases, and the active drug which can be present as a solution in either the aqueous phase, oily phase or itself as a separate phase. Pharmaceutical excipients such as emulsifiers, stabilizers, dyes, and anti-oxidants can also be present in emulsions as needed. Pharmaceutical emulsions can also be multiple emulsions that are comprised of more than two phases such as, for example, in the case of oil-in-water-in-oil (o/w/o) and water-in-oil-in-water (w/o/w) emulsions. Such complex formulations often provide certain advantages that simple binary emulsions do not. Multiple emulsions in which individual oil droplets of an o/w emulsion enclose small water droplets constitute a w/o/w emulsion. Likewise a system of oil droplets enclosed in globules of water stabilized in an oily continuous phase provides an o/w/o emulsion.

[0533] Emulsions are characterized by little or no thermodynamic stability. Often, the dispersed or discontinuous phase of the emulsion is well dispersed into the external or continuous phase and maintained in this form through the means of emulsifiers or the viscosity of the formulation. Either of the phases of the emulsion can be a semisolid or a solid, as is the case of emulsion-style ointment bases and creams. Other means of stabilizing emulsions entail the use of emulsifiers that can be incorporated into either phase of the emulsion. Emulsifiers can broadly be classified into four categories: synthetic surfactants, naturally occurring emulsifiers, absorption bases, and finely dispersed solids (see e.g., Ansel's Pharmaceutical Dosage Forms and Drug Delivery Systems, Allen, L V., Popovich N G., and Ansel H C., 2004, Lippincott Williams & Wilkins (8th ed.), New York, N.Y.; Idson, in Pharmaceutical Dosage Forms, Lieberman, Rieger and Banker (Eds.), 1988, Marcel Dekker, Inc., New York, N.Y., volume 1, p. 199).

[0534] Synthetic surfactants, also known as surface active agents, have found wide applicability in the formulation of emulsions and have been reviewed in the literature (see e.g., Ansel's Pharmaceutical Dosage Forms and Drug Delivery Systems, Allen, L V., Popovich N G., and Ansel H C., 2004, Lippincott Williams & Wilkins (8th ed.), New York, N.Y.; Rieger, in Pharmaceutical Dosage Forms, Lieberman, Rieger and Banker (Eds.), 1988, Marcel Dekker, Inc., New York, N.Y., volume 1, p. 285; Idson, in Pharmaceutical Dosage Forms, Lieberman, Rieger and Banker (Eds.), Marcel Dekker, Inc., New York, N.Y., 1988, volume 1, p. 199). Surfactants are typically amphiphilic and comprise a hydrophilic and a hydrophobic portion. The ratio of the hydrophilic to the hydrophobic nature of the surfactant has been termed the hydrophile/lipophile balance (HLB) and is a valuable tool in categorizing and selecting surfactants in the preparation of formulations. Surfactants can be classified into different classes based on the nature of the hydrophilic group: nonionic, anionic, cationic and amphoteric (see e.g., Ansel's Pharmaceutical Dosage Forms and Drug Delivery Systems, Allen, L V., Popovich N G., and Ansel H C., 2004, Lippincott Williams & Wilkins (8th ed.), New York, N.Y. Rieger, in Pharmaceutical Dosage Forms, Lieberman, Rieger and Banker (Eds.), 1988, Marcel Dekker, Inc., New York, N.Y., volume 1, p. 285).

[0535] Naturally occurring emulsifiers used in emulsion formulations include lanolin, beeswax, phosphatides, lecithin and acacia. Absorption bases possess hydrophilic properties such that they can soak up water to form w/o emulsions yet retain their semisolid consistencies, such as anhydrous lanolin and hydrophilic petrolatum. Finely divided solids have also been used as good emulsifiers especially in combination with surfactants and in viscous preparations. These include polar inorganic solids, such as heavy metal hydroxides, nonswelling clays such as bentonite, attapulgite, hectorite, kaolin, montmorillonite, colloidal aluminum silicate and colloidal magnesium aluminum silicate, pigments and nonpolar solids such as carbon or glyceryl tristearate.

[0536] A large variety of non-emulsifying materials are also included in emulsion formulations and contribute to the properties of emulsions. These include fats, oils, waxes, fatty acids, fatty alcohols, fatty esters, humectants, hydrophilic colloids, preservatives and antioxidants (Block, in Pharmaceutical Dosage Forms, Lieberman, Rieger and Banker (Eds.), 1988, Marcel Dekker, Inc., New York, N.Y., volume 1, p. 335; Idson, in Pharmaceutical Dosage Forms, Lieberman, Rieger and Banker (Eds.), 1988, Marcel Dekker, Inc., New York, N.Y., volume 1, p. 199).

[0537] Hydrophilic colloids or hydrocolloids include naturally occurring gums and synthetic polymers such as polysaccharides (for example, acacia, agar, alginic acid, carrageenan, guar gum, karaya gum, and tragacanth), cellulose derivatives (for example, carboxymethylcellulose and carboxypropylcellulose), and synthetic polymers (for example, carbomers, cellulose ethers, and carboxyvinyl polymers). These disperse or swell in water to form colloidal solutions that stabilize emulsions by forming strong interfacial films around the dispersed-phase droplets and by increasing the viscosity of the external phase.

[0538] Since emulsions often contain a number of ingredients such as carbohydrates, proteins, sterols and phosphatides that can readily support the growth of microbes, these formulations often incorporate preservatives. Commonly used preservatives included in emulsion formulations include methyl paraben, propyl paraben, quaternary ammonium salts, benzalkonium chloride, esters of p-hydroxybenzoic acid, and boric acid. Antioxidants are also commonly added to emulsion formulations to prevent deterioration of the formulation. Antioxidants used can be free radical scavengers such as tocopherols, alkyl gallates, butylated hydroxyanisole, butylated hydroxytoluene, or reducing agents such as ascorbic acid and sodium metabisulfite, and antioxidant synergists such as citric acid, tartaric acid, and lecithin.

[0539] The application of emulsion formulations via dermatological, oral and parenteral routes and methods for their manufacture have been reviewed in the literature (see e.g., Ansel's Pharmaceutical Dosage Forms and Drug Delivery Systems, Allen, L V., Popovich N G., and Ansel H C., 2004, Lippincott Williams & Wilkins (8th ed.), New York, N.Y.; Idson, in Pharmaceutical Dosage Forms, Lieberman, Rieger and Banker (Eds.), 1988, Marcel Dekker, Inc., New York, N.Y., volume 1, p. 199). Emulsion formulations for oral delivery have been very widely used because of ease of formulation, as well as efficacy from an absorption and bioavailability standpoint (see e.g., Ansel's Pharmaceutical Dosage Forms and Drug Delivery Systems, Allen, L V., Popovich N G., and Ansel H C., 2004, Lippincott Williams & Wilkins (8th ed.), New York, N.Y.; Rosoff, in Pharmaceutical Dosage Forms, Lieberman, Rieger and Banker (Eds.), 1988, Marcel Dekker, Inc., New York, N.Y., volume 1, p. 245; Idson, in Pharmaceutical Dosage Forms, Lieberman, Rieger and Banker (Eds.), 1988, Marcel Dekker, Inc., New York, N.Y., volume 1, p. 199). Mineral-oil base laxatives, oil-soluble vitamins and high fat nutritive preparations are among the materials that have commonly been administered orally as o/w emulsions.

[0540] ii. Microemulsions

[0541] In one embodiment of the present invention, the compositions of iRNAs and nucleic acids are formulated as microemulsions. A microemulsion can be defined as a system of water, oil and amphiphile which is a single optically isotropic and thermodynamically stable liquid solution (see e.g., Ansel's Pharmaceutical Dosage Forms and Drug Delivery Systems, Allen, L V., Popovich N G., and Ansel H C., 2004, Lippincott Williams & Wilkins (8th ed.), New York, N.Y.; Rosoff, in Pharmaceutical Dosage Forms, Lieberman, Rieger and Banker (Eds.), 1988, Marcel Dekker, Inc., New York, N.Y., volume 1, p. 245). Typically microemulsions are systems that are prepared by first dispersing an oil in an aqueous surfactant solution and then adding a sufficient amount of a fourth component, generally an intermediate chain-length alcohol to form a transparent system. Therefore, microemulsions have also been described as thermodynamically stable, isotropically clear dispersions of two immiscible liquids that are stabilized by interfacial films of surface-active molecules (Leung and Shah, in: Controlled Release of Drugs: Polymers and Aggregate Systems, Rosoff, M., Ed., 1989, VCH Publishers, New York, pages 185-215). Microemulsions commonly are prepared via a combination of three to five components that include oil, water, surfactant, cosurfactant and electrolyte. Whether the microemulsion is of the water-in-oil (w/o) or an oil-in-water (o/w) type is dependent on the properties of the oil and surfactant used and on the structure and geometric packing of the polar heads and hydrocarbon tails of the surfactant molecules (Schott, in Remington's Pharmaceutical Sciences, Mack Publishing Co., Easton, Pa., 1985, p. 271).

[0542] The phenomenological approach utilizing phase diagrams has been extensively studied and has yielded a comprehensive knowledge, to one skilled in the art, of how to formulate microemulsions (see e.g., Ansel's Pharmaceutical Dosage Forms and Drug Delivery Systems, Allen, L V., Popovich N G., and Ansel H C., 2004, Lippincott Williams & Wilkins (8th ed.), New York, N.Y.; Rosoff, in Pharmaceutical Dosage Forms, Lieberman, Rieger and Banker (Eds.), 1988, Marcel Dekker, Inc., New York, N.Y., volume 1, p. 245; Block, in Pharmaceutical Dosage Forms, Lieberman, Rieger and Banker (Eds.), 1988, Marcel Dekker, Inc., New York, N.Y., volume 1, p. 335). Compared to conventional emulsions, microemulsions offer the advantage of solubilizing water-insoluble drugs in a formulation of thermodynamically stable droplets that are formed spontaneously.

[0543] Surfactants used in the preparation of microemulsions include, but are not limited to, ionic surfactants, non-ionic surfactants, Brij 96, polyoxyethylene oleyl ethers, polyglycerol fatty acid esters, tetraglycerol monolaurate (ML310), tetraglycerol monooleate (MO310), hexaglycerol monooleate (PO310), hexaglycerol pentaoleate (PO500), decaglycerol monocaprate (MCA750), decaglycerol monooleate (MO750), decaglycerol sequioleate (SO750), decaglycerol decaoleate (DAO750), alone or in combination with cosurfactants. The cosurfactant, usually a short-chain alcohol such as ethanol, 1-propanol, and 1-butanol, serves to increase the interfacial fluidity by penetrating into the surfactant film and consequently creating a disordered film because of the void space generated among surfactant molecules. Microemulsions can, however, be prepared without the use of cosurfactants and alcohol-free self-emulsifying microemulsion systems are known in the art. The aqueous phase can typically be, but is not limited to, water, an aqueous solution of the drug, glycerol, PEG300, PEG400, polyglycerols, propylene glycols, and derivatives of ethylene glycol. The oil phase can include, but is not limited to, materials such as Captex 300, Captex 355, Capmul MCM, fatty acid esters, medium chain (C8-C12) mono, di, and tri-glycerides, polyoxyethylated glyceryl fatty acid esters, fatty alcohols, polyglycolized glycerides, saturated polyglycolized C8-C10 glycerides, vegetable oils and silicone oil.

[0544] Microemulsions are particularly of interest from the standpoint of drug solubilization and the enhanced absorption of drugs. Lipid based microemulsions (both o/w and w/o) have been proposed to enhance the oral bioavailability of drugs, including peptides (see e.g., U.S. Pat. Nos. 6,191,105; 7,063,860; 7,070,802; 7,157,099; Constantinides et al., Pharmaceutical Research, 1994, 11, 1385-1390; Ritschel, Meth. Find. Exp. Clin. Pharmacol., 1993, 13, 205). Microemulsions afford advantages of improved drug solubilization, protection of drug from enzymatic hydrolysis, possible enhancement of drug absorption due to surfactant-induced alterations in membrane fluidity and permeability, ease of preparation, ease of oral administration over solid dosage forms, improved clinical potency, and decreased toxicity (see e.g., U.S. Pat. Nos. 6,191,105; 7,063,860; 7,070,802; 7,157,099; Constantinides et al., Pharmaceutical Research, 1994, 11, 1385; Ho et al., J. Pharm. Sci., 1996, 85, 138-143). Often microemulsions can form spontaneously when their components are brought together at ambient temperature. This can be particularly advantageous when formulating thermolabile drugs, peptides or iRNAs. Microemulsions have also been effective in the transdermal delivery of active components in both cosmetic and pharmaceutical applications. It is expected that the microemulsion compositions and formulations of the present invention will facilitate the increased systemic absorption of iRNAs and nucleic acids from the gastrointestinal tract, as well as improve the local cellular uptake of iRNAs and nucleic acids.

[0545] Microemulsions of the present invention can also contain additional components and additives such as sorbitan monostearate (Grill 3), Labrasol, and penetration enhancers to improve the properties of the formulation and to enhance the absorption of the iRNAs and nucleic acids of the present invention. Penetration enhancers used in the microemulsions of the present invention can be classified as belonging to one of five broad categories—surfactants, fatty acids, bile salts, chelating agents, and non-chelating non-surfactants (Lee et al., Critical Reviews in Therapeutic Drug Carrier Systems, 1991, p. 92). Each of these classes has been discussed above.

[0546] iii. Microparticles

[0547] an RNAi agent of the invention may be incorporated into a particle, e.g., a microparticle. Microparticles can be produced by spray-drying, but may also be produced by other methods including lyophilization, evaporation, fluid bed drying, vacuum drying, or a combination of these techniques.

[0548] iv. Penetration Enhancers

[0549] In one embodiment, the present invention employs various penetration enhancers to effect the efficient delivery of nucleic acids, particularly iRNAs, to the skin of animals. Most drugs are present in solution in both ionized and nonionized forms. However, usually only lipid soluble or lipophilic drugs readily cross cell membranes. It has been discovered that even non-lipophilic drugs can cross cell membranes if the membrane to be crossed is treated with a penetration enhancer. In addition to aiding the diffusion of non-lipophilic drugs across cell membranes, penetration enhancers also enhance the permeability of lipophilic drugs.

[0550] Penetration enhancers can be classified as belonging to one of five broad categories, i.e., surfactants, fatty acids, bile salts, chelating agents, and non-chelating non-surfactants (see e.g., Malmsten, M. Surfactants and polymers in drug delivery, Informa Health Care, New York, N.Y., 2002; Lee et al., Critical Reviews in Therapeutic Drug Carrier Systems, 1991, p. 92). Each of the above mentioned classes of penetration enhancers are described below in greater detail.

[0551] Surfactants (or “surface-active agents”) are chemical entities which, when dissolved in an aqueous solution, reduce the surface tension of the solution or the interfacial tension between the aqueous solution and another liquid, with the result that absorption of iRNAs through the mucosa is enhanced. In addition to bile salts and fatty acids, these penetration enhancers include, for example, sodium lauryl sulfate, polyoxyethylene-9-lauryl ether and polyoxyethylene-20-cetyl ether) (see e.g., Malmsten, M. Surfactants and polymers in drug delivery, Informa Health Care, New York, N.Y., 2002; Lee et al., Critical Reviews in Therapeutic Drug Carrier Systems, 1991, p. 92); and perfluorochemical emulsions, such as FC-43. Takahashi et al., J. Pharm. Pharmacol., 1988, 40, 252).

[0552] Various fatty acids and their derivatives which act as penetration enhancers include, for example, oleic acid, lauric acid, capric acid (n-decanoic acid), myristic acid, palmitic acid, stearic acid, linoleic acid, linolenic acid, dicaprate, tricaprate, monoolein (1-monooleoyl-rac-glycerol), dilaurin, caprylic acid, arachidonic acid, glycerol 1-monocaprate, 1-dodecylazacycloheptan-2-one, acylcarnitines, acylcholines, C₁₋₂₀ alkyl esters thereof (e.g., methyl, isopropyl and t-butyl), and mono- and di-glycerides thereof (i.e., oleate, laurate, caprate, myristate, palmitate, stearate, linoleate, etc.) (see e.g., Touitou, E., et al. Enhancement in Drug Delivery, CRC Press, Danvers, Mass., 2006; Lee et al., Critical Reviews in Therapeutic Drug Carrier Systems, 1991, p. 92; Muranishi, Critical Reviews in Therapeutic Drug Carrier Systems, 1990, 7, 1-33; El Hariri et al., J. Pharm. Pharmacol., 1992, 44, 651-654).

[0553] The physiological role of bile includes the facilitation of dispersion and absorption of lipids and fat-soluble vitamins (see e.g., Malmsten, M. Surfactants and polymers in drug delivery, Informa Health Care, New York, N.Y., 2002; Brunton, Chapter 38 in: Goodman & Gilman's The Pharmacological Basis of Therapeutics, 9th Ed., Hardman et al. Eds., McGraw-Hill, New York, 1996, pp. 934-935). Various natural bile salts, and their synthetic derivatives, act as penetration enhancers. Thus the term “bile salts” includes any of the naturally occurring components of bile as well as any of their synthetic derivatives. Suitable bile salts include, for example, cholic acid (or its pharmaceutically acceptable sodium salt, sodium cholate), dehydrocholic acid (sodium dehydrocholate), deoxycholic acid (sodium deoxycholate), glucholic acid (sodium glucholate), glycholic acid (sodium glycocholate), glycodeoxycholic acid (sodium glycodeoxycholate), taurocholic acid (sodium taurocholate), taurodeoxycholic acid (sodium taurodeoxycholate), chenodeoxycholic acid (sodium chenodeoxycholate), ursodeoxycholic acid (UDCA), sodium tauro-24,25-dihydro-fusidate (STDHF), sodium glycodihydrofusidate and polyoxyethylene-9-lauryl ether (POE) (see e.g., Malmsten, M. Surfactants and polymers in drug delivery, Informa Health Care, New York, N.Y., 2002; Lee et al., Critical Reviews in Therapeutic Drug Carrier Systems, 1991, page 92; Swinyard, Chapter 39 In: Remington's Pharmaceutical Sciences, 18th Ed., Gennaro, ed., Mack Publishing Co., Easton, Pa., 1990, pages 782-783; Muranishi, Critical Reviews in Therapeutic Drug Carrier Systems, 1990, 7, 1-33; Yamamoto et al., J. Pharm. Exp. Ther., 1992, 263, 25; Yamashita et al., J. Pharm. Sci., 1990, 79, 579-583).

[0554] Chelating agents, as used in connection with the present invention, can be defined as compounds that remove metallic ions from solution by forming complexes therewith, with the result that absorption of iRNAs through the mucosa is enhanced. With regards to their use as penetration enhancers in the present invention, chelating agents have the added advantage of also serving as DNase inhibitors, as most characterized DNA nucleases require a divalent metal ion for catalysis and are thus inhibited by chelating agents (Jarrett, J. Chromatogr., 1993, 618, 315-339). Suitable chelating agents include but are not limited to disodium ethylenediaminetetraacetate (EDTA), citric acid, salicylates (e.g., sodium salicylate, 5-methoxysalicylate and homovanilate), N-acyl derivatives of collagen, laureth-9 and N-amino acyl derivatives of beta-diketones (enamines)(see e.g., Katdare, A. et al., Excipient development for pharmaceutical, biotechnology, and drug delivery, CRC Press, Danvers, Mass., 2006; Lee et al., Critical Reviews in Therapeutic Drug Carrier Systems, 1991, page 92; Muranishi, Critical Reviews in Therapeutic Drug Carrier Systems, 1990, 7, 1-33; Buur et al., J. Control Rel., 1990, 14, 43-51).

[0555] As used herein, non-chelating non-surfactant penetration enhancing compounds can be defined as compounds that demonstrate insignificant activity as chelating agents or as surfactants but that nonetheless enhance absorption of iRNAs through the alimentary mucosa (see e.g., Muranishi, Critical Reviews in Therapeutic Drug Carrier Systems, 1990, 7, 1-33). This class of penetration enhancers includes, for example, unsaturated cyclic ureas, 1-alkyl- and 1-alkenylazacyclo-alkanone derivatives (Lee et al., Critical Reviews in Therapeutic Drug Carrier Systems, 1991, page 92); and non-steroidal anti-inflammatory agents such as diclofenac sodium, indomethacin and phenylbutazone (Yamashita et al., J. Pharm. Pharmacol., 1987, 39, 621-626).

[0556] Agents that enhance uptake of iRNAs at the cellular level can also be added to the pharmaceutical and other compositions of the present invention. For example, cationic lipids, such as lipofectin (Junichi et al, U.S. Pat. No. 5,705,188), cationic glycerol derivatives, and polycationic molecules, such as polylysine (Lollo et al., PCT Application WO 97/30731), are also known to enhance the cellular uptake of dsRNAs. Examples of commercially available transfection reagents include, for example Lipofectamine™ (Invitrogen; Carlsbad, Calif.), Lipofectamine 2000™ (Invitrogen; Carlsbad, Calif.), 293Fectin™ (Invitrogen; Carlsbad, Calif.), Cellfectin™ (Invitrogen; Carlsbad, Calif.), DMRIE-C™ (Invitrogen; Carlsbad, Calif.), FreeStyle™ MAX (Invitrogen; Carlsbad, Calif.), Lipofectamine™ 2000 CD (Invitrogen; Carlsbad, Calif.), Lipofectamine™ (Invitrogen; Carlsbad, Calif.), RNAiMAX (Invitrogen; Carlsbad, Calif.), Oligofectamine™ (Invitrogen; Carlsbad, Calif.), Optifect™ (Invitrogen; Carlsbad, Calif.), X-tremeGENE Q2 Transfection Reagent (Roche; Grenzacherstrasse, Switzerland), DOTAP Liposomal Transfection Reagent (Grenzacherstrasse, Switzerland), DOSPER Liposomal Transfection Reagent (Grenzacherstrasse, Switzerland), or Fugene (Grenzacherstrasse, Switzerland), Transfectam® Reagent (Promega; Madison, Wis.), TransFast™ Transfection Reagent (Promega; Madison, Wis.), Tfx™-20 Reagent (Promega; Madison, Wis.), Tfx™-50 Reagent (Promega; Madison, Wis.), DreamFect™ (OZ Biosciences; Marseille, France), EcoTransfect (OZ Biosciences; Marseille, France), TransPassa D1 Transfection Reagent (New England Biolabs; Ipswich, Mass., USA), LyoVec™/LipoGen™ (Invitrogen; San Diego, Calif., USA), PerFectin Transfection Reagent (Genlantis; San Diego, Calif., USA), NeuroPORTER Transfection Reagent (Genlantis; San Diego, Calif., USA), GenePORTER Transfection reagent (Genlantis; San Diego, Calif., USA), GenePORTER 2 Transfection reagent (Genlantis; San Diego, Calif., USA), Cytofectin Transfection Reagent (Genlantis; San Diego, Calif., USA), BaculoPORTER Transfection Reagent (Genlantis; San Diego, Calif., USA), TroganPORTER™ transfection Reagent (Genlantis; San Diego, Calif., USA), RiboFect (Bioline; Taunton, Mass., USA), PlasFect (Bioline; Taunton, Mass., USA), UniFECTOR (B-Bridge International; Mountain View, Calif., USA), SureFECTOR (B-Bridge International; Mountain View, Calif., USA), or HiFect™ (B-Bridge International, Mountain View, Calif., USA), among others.

[0557] Other agents can be utilized to enhance the penetration of the administered nucleic acids, including glycols such as ethylene glycol and propylene glycol, pyrrols such as 2-pyrrol, azones, and terpenes such as limonene and menthone.

[0558] v. Carriers

[0559] Certain compositions of the present invention also incorporate carrier compounds in the formulation. As used herein, “carrier compound” or “carrier” can refer to a nucleic acid, or analog thereof, which is inert (i.e., does not possess biological activity per se) but is recognized as a nucleic acid by in vivo processes that reduce the bioavailability of a nucleic acid having biological activity by, for example, degrading the biologically active nucleic acid or promoting its removal from circulation. The coadministration of a nucleic acid and a carrier compound, typically with an excess of the latter substance, can result in a substantial reduction of the amount of nucleic acid recovered in the liver, kidney or other extracirculatory reservoirs, presumably due to competition between the carrier compound and the nucleic acid for a common receptor. For example, the recovery of a partially phosphorothioate dsRNA in hepatic tissue can be reduced when it is coadministered with polyinosinic acid, dextran sulfate, polycytidic acid or 4-acetamido-4′isothiocyano-stilbene-2,2′-disulfonic acid (Miyao et al., DsRNA Res. Dev., 1995, 5, 115-121; Takakura et al., DsRNA & Nucl. Acid Drug Dev., 1996, 6, 177-183.

[0560] vi. Excipients

[0561] In contrast to a carrier compound, a “pharmaceutical carrier” or “excipient” is a pharmaceutically acceptable solvent, suspending agent or any other pharmacologically inert vehicle for delivering one or more nucleic acids to an animal. The excipient can be liquid or solid and is selected, with the planned manner of administration in mind, so as to provide for the desired bulk, consistency, etc., when combined with a nucleic acid and the other components of a given pharmaceutical composition. Typical pharmaceutical carriers include, but are not limited to, binding agents (e.g., pregelatinized maize starch, polyvinylpyrrolidone or hydroxypropyl methylcellulose, etc.); fillers (e.g., lactose and other sugars, microcrystalline cellulose, pectin, gelatin, calcium sulfate, ethyl cellulose, polyacrylates or calcium hydrogen phosphate, etc.); lubricants (e.g., magnesium stearate, talc, silica, colloidal silicon dioxide, stearic acid, metallic stearates, hydrogenated vegetable oils, corn starch, polyethylene glycols, sodium benzoate, sodium acetate, etc.); disintegrants (e.g., starch, sodium starch glycolate, etc.); and wetting agents (e.g., sodium lauryl sulphate, etc).

[0562] Pharmaceutically acceptable organic or inorganic excipients suitable for non-parenteral administration which do not deleteriously react with nucleic acids can also be used to formulate the compositions of the present invention. Suitable pharmaceutically acceptable carriers include, but are not limited to, water, salt solutions, alcohols, polyethylene glycols, gelatin, lactose, amylose, magnesium stearate, talc, silicic acid, viscous paraffin, hydroxymethylcellulose, polyvinylpyrrolidone and the like.

[0563] Formulations for topical administration of nucleic acids can include sterile and non-sterile aqueous solutions, non-aqueous solutions in common solvents such as alcohols, or solutions of the nucleic acids in liquid or solid oil bases. The solutions can also contain buffers, diluents and other suitable additives. Pharmaceutically acceptable organic or inorganic excipients suitable for non-parenteral administration which do not deleteriously react with nucleic acids can be used.

[0564] Suitable pharmaceutically acceptable excipients include, but are not limited to, water, salt solutions, alcohol, polyethylene glycols, gelatin, lactose, amylose, magnesium stearate, talc, silicic acid, viscous paraffin, hydroxymethylcellulose, polyvinylpyrrolidone and the like.

[0565] vii. Other Components

[0566] The compositions of the present invention can additionally contain other adjunct components conventionally found in pharmaceutical compositions, at their art-established usage levels. Thus, for example, the compositions can contain additional, compatible, pharmaceutically-active materials such as, for example, antipruritics, astringents, local anesthetics or anti-inflammatory agents, or can contain additional materials useful in physically formulating various dosage forms of the compositions of the present invention, such as dyes, flavoring agents, preservatives, antioxidants, opacifiers, thickening agents and stabilizers. However, such materials, when added, should not unduly interfere with the biological activities of the components of the compositions of the present invention. The formulations can be sterilized and, if desired, mixed with auxiliary agents, e.g., lubricants, preservatives, stabilizers, wetting agents, emulsifiers, salts for influencing osmotic pressure, buffers, colorings, flavorings and/or aromatic substances and the like which do not deleteriously interact with the nucleic acid(s) of the formulation.

[0567] Aqueous suspensions can contain substances which increase the viscosity of the suspension including, for example, sodium carboxymethylcellulose, sorbitol and/or dextran. The suspension can also contain stabilizers.

[0568] In some embodiments, pharmaceutical compositions featured in the invention include (a) one or more iRNA compounds and (b) one or more agents which function by a non-RNAi mechanism and which are useful in treating a hemolytic disorder. Examples of such agents include, but are not limited to an anti-inflammatory agent, anti-steatosis agent, anti-viral, and/or anti-fibrosis agent. In addition, other substances commonly used to protect the liver, such as silymarin, can also be used in conjunction with the iRNAs described herein. Other agents useful for treating liver diseases include telbivudine, entecavir, and protease inhibitors such as telaprevir and other disclosed, for example, in Tung et al., U.S. Application Publication Nos. 2005/0148548, 2004/0167116, and 2003/0144217; and in Hale et al., U.S. Application Publication No. 2004/0127488.

[0569] Toxicity and therapeutic efficacy of such compounds can be determined by standard pharmaceutical procedures in cell cultures or experimental animals, e.g., for determining the LD50 (the dose lethal to 50% of the population) and the ED50 (the dose therapeutically effective in 50% of the population). The dose ratio between toxic and therapeutic effects is the therapeutic index and it can be expressed as the ratio LD50/ED50. Compounds that exhibit high therapeutic indices are preferred.

[0570] The data obtained from cell culture assays and animal studies can be used in formulating a range of dosage for use in humans. The dosage of compositions featured herein in the invention lies generally within a range of circulating concentrations that include the ED50 with little or no toxicity. The dosage can vary within this range depending upon the dosage form employed and the route of administration utilized. For any compound used in the methods featured in the invention, the therapeutically effective dose can be estimated initially from cell culture assays. A dose can be formulated in animal models to achieve a circulating plasma concentration range of the compound or, when appropriate, of the polypeptide product of a target sequence (e.g., achieving a decreased concentration of the polypeptide) that includes the IC50 (i.e., the concentration of the test compound which achieves a half-maximal inhibition of symptoms) as determined in cell culture. Such information can be used to more accurately determine useful doses in humans. Levels in plasma can be measured, for example, by high performance liquid chromatography.

[0571] In addition to their administration, as discussed above, the iRNAs featured in the invention can be administered in combination with other known agents effective in treatment of pathological processes mediated by C5 expression. In any event, the administering physician can adjust the amount and timing of iRNA administration on the basis of results observed using standard measures of efficacy known in the art or described herein.

### VI. Methods for Inhibiting C5 Expression

[0572] The present invention provides methods of inhibiting expression of C5 in a cell. The methods include contacting a cell with an RNAi agent, e.g., a double stranded RNAi agent, in an amount effective to inhibit expression of the C5 in the cell, thereby inhibiting expression of the C5 in the cell.

[0573] Contacting of a cell with a double stranded RNAi agent may be done in vitro or in vivo. Contacting a cell in vivo with the RNAi agent includes contacting a cell or group of cells within a subject, e.g., a human subject, with the RNAi agent. Combinations of in vitro and in vivo methods of contacting are also possible. Contacting may be direct or indirect, as discussed above. Furthermore, contacting a cell may be accomplished via a targeting ligand, including any ligand described herein or known in the art. In preferred embodiments, the targeting ligand is a carbohydrate moiety, e.g., a GalNAc₃ ligand, or any other ligand that directs the RNAi agent to a site of interest, e.g., the liver of a subject.

[0574] The term “inhibiting,” as used herein, is used interchangeably with “reducing,” “silencing,” “downregulating” and other similar terms, and includes any level of inhibition.

[0575] The phrase “inhibiting expression of a C5” is intended to refer to inhibition of expression of any C5 gene (such as, e.g., a mouse C5 gene, a rat C5 gene, a monkey C5 gene, or a human C5 gene) as well as variants or mutants of a C5 gene. Thus, the C5 gene may be a wild-type C5 gene, a mutant C5 gene, or a transgenic C5 gene in the context of a genetically manipulated cell, group of cells, or organism.

[0576] “Inhibiting expression of a C5 gene” includes any level of inhibition of a C5 gene, e.g., at least partial suppression of the expression of a C5 gene. The expression of the C5 gene may be assessed based on the level, or the change in the level, of any variable associated with C5 gene expression, e.g., C5 mRNA level, C5 protein level, or for example, CH₅₀ activity as a measure of total hemolytic complement, AH₅₀ to measure the hemolytic activity of the alternate pathway of complement, and/or lactate dehydrogenase (LDH) levels as a measure of intravascular hemolysis, and/or hemoglobin levels. Levels of C5a, C5b, and soluble C5b-9 complex may also be measured to assess C5 expression. This level may be assessed in an individual cell or in a group of cells, including, for example, a sample derived from a subject.

[0577] Inhibition may be assessed by a decrease in an absolute or relative level of one or more variables that are associated with C5 expression compared with a control level. The control level may be any type of control level that is utilized in the art, e.g., a pre-dose baseline level, or a level determined from a similar subject, cell, or sample that is untreated or treated with a control (such as, e.g., buffer only control or inactive agent control).

[0578] In some embodiments of the methods of the invention, expression of a C5 gene is inhibited by at least about 5%, at least about 10%, at least about 15%, at least about 20%, at least about 25%, at least about 30%, at least about 35%, at least about 40%, at least about 45%, at least about 50%, at least about 55%, at least about 60%, at least about 65%, at least about 70%, at least about 75%, at least about 80%, at least about 85%, at least about 90%, at least about 91%, at least about 92%, at least about 93%, at least about 94%. at least about 95%, at least about 96%, at least about 97%, at least about 98%, or at least about 99%.

[0579] Inhibition of the expression of a C5 gene may be manifested by a reduction of the amount of mRNA expressed by a first cell or group of cells (such cells may be present, for example, in a sample derived from a subject) in which a C5 gene is transcribed and which has or have been treated (e.g., by contacting the cell or cells with an RNAi agent of the invention, or by administering an RNAi agent of the invention to a subject in which the cells are or were present) such that the expression of a C5 gene is inhibited, as compared to a second cell or group of cells substantially identical to the first cell or group of cells but which has not or have not been so treated (control cell(s)). In preferred embodiments, the inhibition is assessed by expressing the level of mRNA in treated cells as a percentage of the level of mRNA in control cells, using the following formula:

$$\frac{( mRNA in control cells ) - ( mRNA in treated cells )}{( mRNA in control cells )} •100 \%$$

[0580] Alternatively, inhibition of the expression of a C5 gene may be assessed in terms of a reduction of a parameter that is functionally linked to C5 gene expression, e.g., C5 protein expression, hepcidin gene or protein expression, or iron levels in tissues or serum. C5 gene silencing may be determined in any cell expressing C5, either constitutively or by genomic engineering, and by any assay known in the art. The liver is the major site of C5 expression. Other significant sites of expression include the kidneys and the uterus.

[0581] Inhibition of the expression of a C5 protein may be manifested by a reduction in the level of the C5 protein that is expressed by a cell or group of cells (e.g., the level of protein expressed in a sample derived from a subject). As explained above for the assessment of mRNA suppression, the inhibiton of protein expression levels in a treated cell or group of cells may similarly be expressed as a percentage of the level of protein in a control cell or group of cells.

[0582] A control cell or group of cells that may be used to assess the inhibition of the expression of a C5 gene includes a cell or group of cells that has not yet been contacted with an RNAi agent of the invention. For example, the control cell or group of cells may be derived from an individual subject (e.g., a human or animal subject) prior to treatment of the subject with an RNAi agent.

[0583] The level of C5 mRNA that is expressed by a cell or group of cells may be determined using any method known in the art for assessing mRNA expression. In one embodiment, the level of expression of C5 in a sample is determined by detecting a transcribed polynucleotide, or portion thereof, e.g., mRNA of the C5 gene. RNA may be extracted from cells using RNA extraction techniques including, for example, using acid phenol/guanidine isothiocyanate extraction (RNAzol B; Biogenesis), RNeasy RNA preparation kits (Qiagen) or PAXgene (PreAnalytix, Switzerland). Typical assay formats utilizing ribonucleic acid hybridization include nuclear run-on assays, RT-PCR, RNase protection assays (Melton et al., Nuc. Acids Res. 12:7035), Northern blotting, in situ hybridization, and microarray analysis.

[0584] In one embodiment, the level of expression of C5 is determined using a nucleic acid probe. The term “probe”, as used herein, refers to any molecule that is capable of selectively binding to a specific C5. Probes can be synthesized by one of skill in the art, or derived from appropriate biological preparations. Probes may be specifically designed to be labeled. Examples of molecules that can be utilized as probes include, but are not limited to, RNA, DNA, proteins, antibodies, and organic molecules.

[0585] Isolated mRNA can be used in hybridization or amplification assays that include, but are not limited to, Southern or Northern analyses, polymerase chain reaction (PCR) analyses and probe arrays. One method for the determination of mRNA levels involves contacting the isolated mRNA with a nucleic acid molecule (probe) that can hybridize to C5 mRNA. In one embodiment, the mRNA is immobilized on a solid surface and contacted with a probe, for example by running the isolated mRNA on an agarose gel and transferring the mRNA from the gel to a membrane, such as nitrocellulose. In an alternative embodiment, the probe(s) are immobilized on a solid surface and the mRNA is contacted with the probe(s), for example, in an Affymetrix gene chip array. A skilled artisan can readily adapt known mRNA detection methods for use in determining the level of C5 mRNA.

[0586] An alternative method for determining the level of expression of C5 in a sample involves the process of nucleic acid amplification and/or reverse transcriptase (to prepare cDNA) of for example mRNA in the sample, e.g., by RT-PCR (the experimental embodiment set forth in Mullis, 1987, U.S. Pat. No. 4,683,202), ligase chain reaction (Barany (1991) Proc. Natl. Acad. Sci. USA 88:189-193), self sustained sequence replication (Guatelli et al. (1990) Proc. Natl. Acad. Sci. USA 87:1874-1878), transcriptional amplification system (Kwoh et al. (1989) Proc. Natl. Acad. Sci. USA 86:1173-1177), Q-Beta Replicase (Lizardi et al. (1988) Bio/Technology 6:1197), rolling circle replication (Lizardi et al., U.S. Pat. No. 5,854,033) or any other nucleic acid amplification method, followed by the detection of the amplified molecules using techniques well known to those of skill in the art. These detection schemes are especially useful for the detection of nucleic acid molecules if such molecules are present in very low numbers. In particular aspects of the invention, the level of expression of C5 is determined by quantitative fluorogenic RT-PCR (i.e., the TaqMan™ System).

[0587] The expression levels of C5 mRNA may be monitored using a membrane blot (such as used in hybridization analysis such as Northern, Southern, dot, and the like), or microwells, sample tubes, gels, beads or fibers (or any solid support comprising bound nucleic acids). See U.S. Pat. Nos. 5,770,722, 5,874,219, 5,744,305, 5,677,195 and 5,445,934, which are incorporated herein by reference. The determination of C5 expression level may also comprise using nucleic acid probes in solution.

[0588] In preferred embodiments, the level of mRNA expression is assessed using branched DNA (bDNA) assays or real time PCR (qPCR). The use of these methods is described and exemplified in the Examples presented herein.

[0589] The level of C5 protein expression may be determined using any method known in the art for the measurement of protein levels. Such methods include, for example, electrophoresis, capillary electrophoresis, high performance liquid chromatography (HPLC), thin layer chromatography (TLC), hyperdiffusion chromatography, fluid or gel precipitin reactions, absorption spectroscopy, a colorimetric assays, spectrophotometric assays, flow cytometry, immunodiffusion (single or double), immunoelectrophoresis, Western blotting, radioimmunoas say (RIA), enzyme-linked immunosorbent assays (ELISAs), immunofluorescent assays, electrochemiluminescence assays, and the like.

[0590] The term “sample” as used herein refers to a collection of similar fluids, cells, or tissues isolated from a subject, as well as fluids, cells, or tissues present within a subject. Examples of biological fluids include blood, serum and serosal fluids, plasma, lymph, urine, cerebrospinal fluid, saliva, ocular fluids, and the like. Tissue samples may include samples from tissues, organs or localized regions. For example, samples may be derived from particular organs, parts of organs, or fluids or cells within those organs. In certain embodiments, samples may be derived from the liver (e.g., whole liver or certain segments of liver or certain types of cells in the liver, such as, e.g., hepatocytes). In preferred embodiments, a “sample derived from a subject” refers to blood or plasma drawn from the subject. In further embodiments, a “sample derived from a subject” refers to liver tissue derived from the subject.

[0591] In some embodiments of the methods of the invention, the RNAi agent is administered to a subject such that the RNAi agent is delivered to a specific site within the subject. The inhibition of expression of C5 may be assessed using measurements of the level or change in the level of C5 mRNA or C5 protein in a sample derived from fluid or tissue from the specific site within the subject. In preferred embodiments, the site is the liver. The site may also be a subsection or subgroup of cells from any one of the aforementioned sites. The site may also include cells that express a particular type of receptor.

[0592] The phrase “contacting a cell with an RNAi agent,” such as a dsRNA, as used herein, includes contacting a cell by any possible means. Contacting a cell with an RNAi agent includes contacting a cell in vitro with the iRNA or contacting a cell in vivo with the iRNA. The contacting may be done directly or indirectly. Thus, for example, the RNAi agent may be put into physical contact with the cell by the individual performing the method, or alternatively, the RNAi agent may be put into a situation that will permit or cause it to subsequently come into contact with the cell.

[0593] Contacting a cell in vitro may be done, for example, by incubating the cell with the RNAi agent. Contacting a cell in vivo may be done, for example, by injecting the RNAi agent into or near the tissue where the cell is located, or by injecting the RNAi agent into another area, e.g., the bloodstream or the subcutaneous space, such that the agent will subsequently reach the tissue where the cell to be contacted is located. For example, the RNAi agent may contain and/or be coupled to a ligand, e.g., GalNAc3, that directs the RNAi agent to a site of interest, e.g., the liver. Combinations of in vitro and in vivo methods of contacting are also possible. For example, a cell may also be contacted in vitro with an RNAi agent and subsequently transplanted into a subject.

[0594] In one embodiment, contacting a cell with an iRNA includes “introducing” or “delivering the iRNA into the cell” by facilitating or effecting uptake or absorption into the cell. Absorption or uptake of an iRNA can occur through unaided diffusive or active cellular processes, or by auxiliary agents or devices. Introducing an iRNA into a cell may be in vitro and/or in vivo. For example, for in vivo introduction, iRNA can be injected into a tissue site or administered systemically. In vivo delivery can also be done by a beta-glucan delivery system, such as those described in U.S. Pat. Nos. 5,032,401 and 5,607,677, and U.S. Publication No. 2005/0281781, the entire contents of which are hereby incorporated herein by reference. In vitro introduction into a cell includes methods known in the art such as electroporation and lipofection. Further approaches are described herein below and/or are known in the art.

### VII. Methods for Treating or Preventing a Complement Component C5-Associated Disorder

[0595] The present invention also provides therapeutic and prophylactic methods which include administering to a subject having a complement component C5-associated disease, e.g., PNH, aHUS, neuromyelitis optica (NMO), or myasthenia gravis, an iRNA agent, pharmaceutical compositions comprising an iRNA agent, or vector comprising an iRNA of the invention. In some aspects of the invention, the methods further include administering to the subject an additional therapeutic agent, such as an anti-complement component C5 antibody, or antigen-binding fragment thereof (e.g., eculizumab).

[0596] In one aspect, the present invention provides methods of treating a subject having a disorder that would benefit from reduction in C5 expression, e.g., a complement component C5-associated disease, e.g., PNH, aHUS, neuromyelitis optica (NMO), or myasthenia gravis. The treatment methods (and uses) of the invention include administering to the subject, e.g., a human, a therapeutically effective amount of an iRNA agent targeting a C5 gene or a pharmaceutical composition comprising an iRNA agent targeting a C5 gene, thereby treating the subject having a disorder that would benefit from reduction in C5 expression.

[0597] In another aspect, the present invention provides methods of treating a subject having a disorder that would benefit from reduction in C5 expression, e.g., a complement component C5-associated disease, e.g., PNH, aHUS, neuromyelitis optica (NMO), or myasthenia gravis, which include administering to the subject, e.g., a human, a therapeutically effective amount of an iRNA agent targeting a C5 gene or a pharmaceutical composition comprising an iRNA agent targeting a C5 gene, and an additional therapeutic agent, such as an anti-complement component C5 antibody, or antigen-binding fragment thereof (e.g., eculizumab), thereby treating the subject having a disorder that would benefit from reduction in C5 expression.

[0598] In one aspect, the invention provides methods of preventing at least one symptom in a subject having a disorder that would benefit from reduction in C5 expression, e.g., a complement component C5-associated disease, e.g., PNH, aHUS, neuromyelitis optica (NMO), or myasthenia gravis. The methods include administering to the subject a prohpylactically effective amount of the iRNA agent, e.g., dsRNA, or vector of the invention, thereby preventing at least one symptom in the subject having a disorder that would benefit from reduction in C5 expression. For example, the invention provides methods for preventing hemolysis in a subject suffering from a disorder that would benefit from reduction in C5 expression, e.g., a complement component C5-associated disease, e.g., PNH, aHUS, neuromyelitis optica (NMO), or myasthenia gravis.

[0599] In another aspect, the invention provides methods of preventing at least one symptom in a subject having a disorder that would benefit from reduction in C5 expression, e.g., a complement component C5-associated disease, e.g., PNH, aHUS, neuromyelitis optica (NMO), or myasthenia gravis. The methods include administering to the subject a prohpylactically effective amount of the iRNA agent, e.g., dsRNA, or vector of the invention, and an additional therapeutic agent, such as an anti-complement component C5 antibody, or antigen-binding fragment thereof (e.g., eculizumab), thereby preventing at least one symptom in the subject having a disorder that would benefit from reduction in C5 expression.

[0600] “Therapeutically effective amount,” as used herein, is intended to include the amount of an RNAi agent or anti-complement component C5 antibody, or antigen-binding fragment thereof (e.g., eculizumab), that, when administered to a subject having a complement component C5-associated disease, is sufficient to effect treatment of the disease (e.g., by diminishing, ameliorating or maintaining the existing disease or one or more symptoms of disease). The “therapeutically effective amount” may vary depending on the RNAi agent or antibody, or antigen-binding fragment thereof, how the agent is administered, the disease and its severity and the history, age, weight, family history, genetic makeup, the types of preceding or concomitant treatments, if any, and other individual characteristics of the subject to be treated.

[0601] “Prophylactically effective amount,” as used herein, is intended to include the amount of an iRNA agent or anti-complement component C5 antibody, or antigen-binding fragment thereof (e.g., eculizumab), that, when administered to a subject having a complement component C5-associate disease but not yet (or currently) experiencing or displaying symptoms of the disease, and/or a subject at risk of developing a complement component C5-associated disease, e.g., a subject having a graft and/or transplant, e.g., a sensitized or allogenic recipient, a subject having sepsis, and/or a subject having a myocardial infarction, is sufficient to prevent or ameliorate the disease or one or more symptoms of the disease. Ameliorating the disease includes slowing the course of the disease or reducing the severity of later-developing disease. The “prophylactically effective amount” may vary depending on the iRNA agent or anti-complement component C5 antibody, or antigen-binding fragment thereof, how the agent or anti-complement component C5 antibody, or antigen-binding fragment thereof, is administered, the degree of risk of disease, and the history, age, weight, family history, genetic makeup, the types of preceding or concomitant treatments, if any, and other individual characteristics of the patient to be treated.

[0602] A “therapeutically effective amount” or “prophylactically effective amount” also includes an amount of an RNAi agent or anti-complement component C5 antibody, or antigen-binding fragment thereof (e.g., eculizumab), that produces some desired local or systemic effect at a reasonable benefit/risk ratio applicable to any treatment. iRNA agents employed in the methods of the present invention may be administered in a sufficient amount to produce a reasonable benefit/risk ratio applicable to such treatment.

[0603] In another aspect, the present invention provides uses of a therapeutically effective amount of an iRNA agent of the invention for treating a subject, e.g., a subject that would benefit from a reduction and/or inhibition of C5 expression.

[0604] In another aspect, the present invention provides uses of a therapeutically effective amount of an iRNA agent of the invention and an additional therapeutic agent, such as an anti-complement component C5 antibody, or antigen-binding fragment thereof (e.g., eculizumab), for treating a subject, e.g., a subject that would benefit from a reduction and/or inhibition of C5 expression.

[0605] In yet another aspect, the present invention provides use of an iRNA agent, e.g., a dsRNA, of the invention targeting a C5 gene or a pharmaceutical composition comprising an iRNA agent targeting a C5 gene in the manufacture of a medicament for treating a subject, e.g., a subject that would benefit from a reduction and/or inhibition of C5 expression, such as a subject having a disorder that would benefit from reduction in C5 expression, e.g., a complement component C5-associated disease, e.g., PNH, aHUS, neuromyelitis optica (NMO), or myasthenia gravis.

[0606] In another aspect, the present invention provides uses of an iRNA agent, e.g., a dsRNA, of the invention targeting a C5 gene or a pharmaceutical composition comprising an iRNA agent targeting a C5 gene in the manufacture of a medicament for use in combination with an additional therapeutic agent, such as an anti-complement component C5 antibody, or antigen-binding fragment thereof (e.g., eculizumab), for treating a subject, e.g., a subject that would benefit from a reduction and/or inhibition of C5 expression, e.g., a complement component C5-associated disease, e.g., PNH, aHUS, neuromyelitis optica (NMO), or myasthenia gravis.

[0607] In another aspect, the invention provides uses of an iRNA, e.g., a dsRNA, of the invention for preventing at least one symptom in a subject suffering from a disorder that would benefit from a reduction and/or inhibition of C5 expression, such as a complement component C5-associated disease, e.g., PNH, aHUS, neuromyelitis optica (NMO), or myasthenia gravis.

[0608] In yet another aspect, the invention provides uses of an iRNA agent, e.g., a dsRNA, of the invention, and an additional therapeutic agent, such as an anti-complement component C5 antibody, or antigen-binding fragment thereof (e.g., eculizumab), for preventing at least one symptom in a subject suffering from a disorder that would benefit from a reduction and/or inhibition of C5 expression, such as a complement component C5-associated disease, e.g., PNH, aHUS, neuromyelitis optica (NMO), or myasthenia gravis.

[0609] In a further aspect, the present invention provides uses of an iRNA agent of the invention in the manufacture of a medicament for preventing at least one symptom in a subject suffering from a disorder that would benefit from a reduction and/or inhibition of C5 expression, such as a complement component C5-associated disease, e.g., PNH, aHUS, neuromyelitis optica (NMO), or myasthenia gravis.

[0610] In a further aspect, the present invention provides uses of an iRNA agent of the invention in the manufacture of a medicament for use in combination with an additional therapeutic agent, such as an anti-complement component C5 antibody, or antigen-binding fragment thereof (e.g., eculizumab), for preventing at least one symptom in a subject suffering from a disorder that would benefit from a reduction and/or inhibition of C5 expression, such as a complement component C5-associated disease, e.g., PNH, aHUS, neuromyelitis optica (NMO), or myasthenia gravis.

[0611] In one embodiment, an iRNA agent targeting C5 is administered to a subject having a complement component C5-associated disease such that C5 levels, e.g., in a cell, tissue, blood, urine or other tissue or fluid of the subject are reduced by at least about 10%, 11%, 12%, 13%, 14%, 15%, 16%, 17%, 18%, 19%, 20%, 21%, 22%, 23%, 24%, 25%, 26%, 27%, 28%, 29%, 30%, 31%, 32%, 33%, 34%, 35%, 36%, 37%, 38%, 39%, 40%, 41%, 42%, 43%, 44%, 45%, 46%, 47%, 48%, 49%, 50%, 51%, 52%, 53%, 54%, 55%, 56%, 57%, 58%, 59%, 60%, 61%, 62%, 62%, 64%, 65%, 66%, 67%, 68%, 69%, 70%, 71%, 72%, 73%, 74%, 75%, 76%, 77%, 78%, 79%, 80%, 81%, 82%, 83%, 84%, 85%, 86%, 87%, 88%, 89%, 90%, 91%, 92%, 93%, 94%, 95%, 96%, 97%, 98%, or at least about 99% or more and, subsequently, an additional therapeutic (as described below) is administered to the subject.

[0612] The additional therapeutic may be an anti-complement component C5 antibody, or antigen-binding fragment or derivative thereof. In one embodiment, the anti-complement component C5 antibody is eculizumab (SOLIRIS®), or antigen-binding fragment or derivative thereof. Eculizumab is a humanized monoclonal IgG2/4, kappa light chain antibody that specifically binds complement component C5 with high affinity and inhibits cleavage of C5 to C5a and C5b, thereby inhibiting the generation of the terminal complement complex C5b-9. Eculizumab is described in U.S. Pat. No. 6,355,245, the entire contents of which are incorporated herein by reference.

[0613] The methods of the invention comprising administration of an iRNA agent of the invention and eculizumab to a subject may further comprise administration of a meningococcal vaccine to the subject.

[0614] The additional therapeutic, e.g., eculizumab and/or a meningococcal vaccine, may be administered to the subject at the same time as the iRNA agent targeting C5 or at a different time.

[0615] Moreover, the additional therapeutic, e.g., eculizumab, may be administered to the subject in the same formulation as the iRNA agent targeting C5 or in a different formulation as the iRNA agent targeting C5.

[0616] In one embodiment, a dsRNA agent is administered to the subject before the anti-complement component C5 antibody, or antigen-binding fragment thereof, is administered to the subject. In one embodiment, the dsRNA agent is administered to the subject first for a period of time sufficient to reduce the levels of complement component C5 in the subject.

[0617] Eculizumab dosage regimens are described in, for example, the product insert for eculizumab (SOLIRIS®) and in U.S. Patent Application No. 2012/0225056, the entire contents of each of which are incorporated herein by reference. In exemplary methods of the invention for treating a complement component C5-associated disease, e.g., PNH, aHUS, neuromyelitis optica (NMO), or myasthenia gravis, an iRNA agent targeting C5 is administered (e.g., subcutaneously) to the subject first, such that the C5 levels in the subject are reduced (e.g., by at least about 20%, 21%, 22%, 23%, 24%, 25%, 26%, 27%, 28%, 29%, 30%, 31%, 32%, 33%, 34%, 35%, 36%, 37%, 38%, 39%, 40%, 41%, 42%, 43%, 44%, 45%, 46%, 47%, 48%, 49%, 50%, 51%, 52%, 53%, 54%, 55%, 56%, 57%, 58%, 59%, 60%, 61%, 62%, 62%, 64%, 65%, 66%, 67%, 68%, 69%, 70%, 71%, 72%, 73%, 74%, 75%, 76%, 77%, 78%, 79%, 80%, 81%, 82%, 83%, 84%, 85%, 86%, 87%, 88%, 89%, 90%, 91%, 92%, 93%, 94%, 95%, 96%, 97%, 98%, or at least about 99% or more) and subsequently eculizumab is administered at doses lower than the ones described in the product insert for SOLIRIS®. For example, eculizumab may be administered to the subject weekly at a dose less than about 600 mg for 4 weeks followed by a fifth dose at about one week later of less than about 900 mg, followed by a dose less than about 900 mg about every two weeks thereafter. Eculizumab may also be administered to the subject weekly at a dose less than about 900 mg for 4 weeks followed by a fifth dose at about one week later of less than about 1200 mg, followed by a dose less than about 1200 mg about every two weeks thereafter. If the subject is less than 18 years of age, eculizumab may be administered to the subject weekly at a dose less than about 900 mg for 4 weeks followed by a fifth dose at about one week later of less than about 1200 mg, followed by a dose less than about 1200 mg about every two weeks thereafter; or if the subject is less than 18 years of age, eculizumab may be administered to the subject weekly at a dose less than about 600 mg for 2 weeks followed by a third dose at about one week later of less than about 900 mg, followed by a dose less than about 900 mg about every two weeks thereafter; or if the subject is less than 18 years of age, eculizumab may be administered to the subject weekly at a dose less than about 600 mg for 2 weeks followed by a third dose at about one week later of less than about 600 mg, followed by a dose less than about 600 mg about every two weeks thereafter; or if the subject is less than 18 years of age, eculizumab may be administered to the subject weekly at a dose less than about 600 mg for 1 week followed by a second dose at about one week later of less than about 300 mg, followed by a dose less than about 300 mg about every two weeks thereafter; or if the subject is less than 18 years of age, eculizumab may be administered to the subject weekly at a dose less than about 300 mg for 1 week followed by a second dose at about one week later of less than about 300 mg, followed by a dose less than about 300 mg about every two weeks thereafter. If the subject is receiving plamapheresis or plasma exchange, eculizumab may be administered to the subject at a dose less than about 300 mg (e.g., if the most recent does of eculizumab was about 300 mg) or less than about 600 mg (e.g., if the most recent does of eculizumab was about 600 mg or more). If the subject is receiving plasma infusion, eculizumab may be administered to the subject at a dose less than about 300 mg (e.g., if the most recent does of eculizumab was about 300 mg or more). The lower doses of eculizumab allow for either subcutaneous or intravenous administration of eculizumab.

[0618] In the combination therapies of the present invention comprising eculizumab, the effective amount of eculizumab to treat the subject may be reduced.

[0619] In one embodiment of the combination therapies of the present invention comprising eculizumab, eculizumab may be administered to the subject, e.g., subcutaneously, at a dose of about 0.01 mg/kg to about 10 mg/kg, or about 5 mg/kg to about 10 mg/kg, or about 0.5 mg/kg to about 15 mg/kg. For example, eculizumab may be administered to the subject, e.g., subcutaneously, at a dose of 0.5 mg/kg, 1 mg/kg, 1.5 mg/kg, 2 mg/kg, 2.5 mg/kg, 3 mg/kg, 3.5 mg/kg, 4 mg/kg, 4.5 mg/kg, 5 mg/kg, 5.5 mg/kg, 6 mg/kg, 6.5 mg/kg, 7 mg/kg, 7.5 mg/kg, 8 mg/kg, 8.5 mg/kg, 9 mg/kg, 9.5 mg/kg, 10 mg/kg, 10.5 mg/kg, 11 mg/kg, 11.5 mg/kg, 12 mg/kg, 12.5 mg/kg, 13 mg/kg, 13.5 mg/kg, 14 mg/kg, 14.5 mg/kg, or 15 mg/kg.

[0620] In one embodiment of the combination therapies of the present invention comprising eculizumab, the lactate dehydrogenase (LDH) serum levels in the treated subject are less than about 1.5 times the upper limit of normal range.

[0621] The methods and uses of the invention include administering a composition described herein such that expression of the target C5 gene is decreased, such as for about 1, 2, 3, 4, 5, 6, 7, 8, 12, 16, 18, 24, 28, 32, 36, 40, 44, 48, 52, 56, 60, 64, 68, 72, 76, or about 80 hours. In one embodiment, expression of the target C5 gene is decreased for an extended duration, e.g., at least about two, three, four, five, six, seven days or more, e.g., about one week, two weeks, three weeks, or about four weeks or longer.

[0622] Administration of the dsRNA according to the methods and uses of the invention may result in a reduction of the severity, signs, symptoms, and/or markers of such diseases or disorders in a patient with a complement component C5-associated disease. By “reduction” in this context is meant a statistically significant decrease in such level. The reduction can be, for example, at least about 5%, 10%, 15%, 20%, 25%, 30%, 35%, 40%, 45%, 50%, 55%, 60%, 65%, 70%, 75%, 80%, 85%, 90%, 95%, or about 100%.

[0623] Efficacy of treatment or prevention of disease can be assessed, for example by measuring disease progression, disease remission, symptom severity, reduction in pain, quality of life, dose of a medication required to sustain a treatment effect, level of a disease marker or any other measurable parameter appropriate for a given disease being treated or targeted for prevention. It is well within the ability of one skilled in the art to monitor efficacy of treatment or prevention by measuring any one of such parameters, or any combination of parameters. For example, efficacy of treatment of a hemolytic disorder may be assessed, for example, by periodic monitoring of LDH and CH₅₀ levels. Comparisons of the later readings with the initial readings provide a physician an indication of whether the treatment is effective. It is well within the ability of one skilled in the art to monitor efficacy of treatment or prevention by measuring any one of such parameters, or any combination of parameters. In connection with the administration of an iRNA targeting C5 or pharmaceutical composition thereof, “effective against” a complement component C5-associated disease indicates that administration in a clinically appropriate manner results in a beneficial effect for at least a statistically significant fraction of patients, such as improvement of symptoms, a cure, a reduction in disease, extension of life, improvement in quality of life, or other effect generally recognized as positive by medical doctors familiar with treating a complement component C5-associated disease and the related causes.

[0624] A treatment or preventive effect is evident when there is a statistically significant improvement in one or more parameters of disease status, or by a failure to worsen or to develop symptoms where they would otherwise be anticipated. As an example, a favorable change of at least 10% in a measurable parameter of disease, and preferably at least 20%, 30%, 40%, 50% or more can be indicative of effective treatment. Efficacy for a given iRNA drug or formulation of that drug can also be judged using an experimental animal model for the given disease as known in the art. When using an experimental animal model, efficacy of treatment is evidenced when a statistically significant reduction in a marker or symptom is observed.

[0625] Alternatively, the efficacy can be measured by a reduction in the severity of disease as determined by one skilled in the art of diagnosis based on a clinically accepted disease severity grading scale, as but one example the Rheumatoid Arthritis Severity Scale (RASS). Any positive change resulting in e.g., lessening of severity of disease measured using the appropriate scale, represents adequate treatment using an iRNA or iRNA formulation as described herein.

[0626] Subjects can be administered a therapeutic amount of iRNA, such as about 0.01 mg/kg, 0.02 mg/kg, 0.03 mg/kg, 0.04 mg/kg, 0.05 mg/kg, 0.1 mg/kg, 0.15 mg/kg, 0.2 mg/kg, 0.25 mg/kg, 0.3 mg/kg, 0.35 mg/kg, 0.4 mg/kg, 0.45 mg/kg, 0.5 mg/kg, 0.55 mg/kg, 0.6 mg/kg, 0.65 mg/kg, 0.7 mg/kg, 0.75 mg/kg, 0.8 mg/kg, 0.85 mg/kg, 0.9 mg/kg, 0.95 mg/kg, 1.0 mg/kg, 1.1 mg/kg, 1.2 mg/kg, 1.3 mg/kg, 1.4 mg/kg, 1.5 mg/kg, 1.6 mg/kg, 1.7 mg/kg, 1.8 mg/kg, 1.9 mg/kg, 2.0 mg/kg, 2.1 mg/kg, 2.2 mg/kg, 2.3 mg/kg, 2.4 mg/kg, 2.5 mg/kg dsRNA, 2.6 mg/kg dsRNA, 2.7 mg/kg dsRNA, 2.8 mg/kg dsRNA, 2.9 mg/kg dsRNA, 3.0 mg/kg dsRNA, 3.1 mg/kg dsRNA, 3.2 mg/kg dsRNA, 3.3 mg/kg dsRNA, 3.4 mg/kg dsRNA, 3.5 mg/kg dsRNA, 3.6 mg/kg dsRNA, 3.7 mg/kg dsRNA, 3.8 mg/kg dsRNA, 3.9 mg/kg dsRNA, 4.0 mg/kg dsRNA, 4.1 mg/kg dsRNA, 4.2 mg/kg dsRNA, 4.3 mg/kg dsRNA, 4.4 mg/kg dsRNA, 4.5 mg/kg dsRNA, 4.6 mg/kg dsRNA, 4.7 mg/kg dsRNA, 4.8 mg/kg dsRNA, 4.9 mg/kg dsRNA, 5.0 mg/kg dsRNA, 5.1 mg/kg dsRNA, 5.2 mg/kg dsRNA, 5.3 mg/kg dsRNA, 5.4 mg/kg dsRNA, 5.5 mg/kg dsRNA, 5.6 mg/kg dsRNA, 5.7 mg/kg dsRNA, 5.8 mg/kg dsRNA, 5.9 mg/kg dsRNA, 6.0 mg/kg dsRNA, 6.1 mg/kg dsRNA, 6.2 mg/kg dsRNA, 6.3 mg/kg dsRNA, 6.4 mg/kg dsRNA, 6.5 mg/kg dsRNA, 6.6 mg/kg dsRNA, 6.7 mg/kg dsRNA, 6.8 mg/kg dsRNA, 6.9 mg/kg dsRNA, 7.0 mg/kg dsRNA, 7.1 mg/kg dsRNA, 7.2 mg/kg dsRNA, 7.3 mg/kg dsRNA, 7.4 mg/kg dsRNA, 7.5 mg/kg dsRNA, 7.6 mg/kg dsRNA, 7.7 mg/kg dsRNA, 7.8 mg/kg dsRNA, 7.9 mg/kg dsRNA, 8.0 mg/kg dsRNA, 8.1 mg/kg dsRNA, 8.2 mg/kg dsRNA, 8.3 mg/kg dsRNA, 8.4 mg/kg dsRNA, 8.5 mg/kg dsRNA, 8.6 mg/kg dsRNA, 8.7 mg/kg dsRNA, 8.8 mg/kg dsRNA, 8.9 mg/kg dsRNA, 9.0 mg/kg dsRNA, 9.1 mg/kg dsRNA, 9.2 mg/kg dsRNA, 9.3 mg/kg dsRNA, 9.4 mg/kg dsRNA, 9.5 mg/kg dsRNA, 9.6 mg/kg dsRNA, 9.7 mg/kg dsRNA, 9.8 mg/kg dsRNA, 9.9 mg/kg dsRNA, 9.0 mg/kg dsRNA, 10 mg/kg dsRNA, 15 mg/kg dsRNA, 20 mg/kg dsRNA, 25 mg/kg dsRNA, 30 mg/kg dsRNA, 35 mg/kg dsRNA, 40 mg/kg dsRNA, 45 mg/kg dsRNA, or about 50 mg/kg dsRNA. Values and ranges intermediate to the recited values are also intended to be part of this invention.

[0627] In certain embodiments, for example, when a composition of the invention comprises a dsRNA as described herein and a lipid, subjects can be administered a therapeutic amount of iRNA, such as about 0.01 mg/kg to about 5 mg/kg, about 0.01 mg/kg to about 10 mg/kg, about 0.05 mg/kg to about 5 mg/kg, about 0.05 mg/kg to about 10 mg/kg, about 0.1 mg/kg to about 5 mg/kg, about 0.1 mg/kg to about 10 mg/kg, about 0.2 mg/kg to about 5 mg/kg, about 0.2 mg/kg to about 10 mg/kg, about 0.3 mg/kg to about 5 mg/kg, about 0.3 mg/kg to about 10 mg/kg, about 0.4 mg/kg to about 5 mg/kg, about 0.4 mg/kg to about 10 mg/kg, about 0.5 mg/kg to about 5 mg/kg, about 0.5 mg/kg to about 10 mg/kg, about 1 mg/kg to about 5 mg/kg, about 1 mg/kg to about 10 mg/kg, about 1.5 mg/kg to about 5 mg/kg, about 1.5 mg/kg to about 10 mg/kg, about 2 mg/kg to about 2.5 mg/kg, about 2 mg/kg to about 10 mg/kg, about 3 mg/kg to about 5 mg/kg, about 3 mg/kg to about 10 mg/kg, about 3.5 mg/kg to about 5 mg/kg, about 4 mg/kg to about 5 mg/kg, about 4.5 mg/kg to about 5 mg/kg, about 4 mg/kg to about 10 mg/kg, about 4.5 mg/kg to about 10 mg/kg, about 5 mg/kg to about 10 mg/kg, about 5.5 mg/kg to about 10 mg/kg, about 6 mg/kg to about 10 mg/kg, about 6.5 mg/kg to about 10 mg/kg, about 7 mg/kg to about 10 mg/kg, about 7.5 mg/kg to about 10 mg/kg, about 8 mg/kg to about 10 mg/kg, about 8.5 mg/kg to about 10 mg/kg, about 9 mg/kg to about 10 mg/kg, or about 9.5 mg/kg to about 10 mg/kg. Values and ranges intermediate to the recited values are also intended to be part of this invention.

[0628] For example, the dsRNA may be administered at a dose of about 0.1, 0.2, 0.3, 0.4, 0.5, 0.6, 0.7, 0.8, 0.9, 1, 1.1, 1.2, 1.3, 1.4, 1.5, 1.6, 1.7, 1.8, 1.9, 2, 2.1, 2.2, 2.3, 2.4, 2.5, 2.6, 2.7, 2.8, 2.9, 3, 3.1, 3.2, 3.3, 3.4, 3.5, 3.6, 3.7, 3.8, 3.9, 4, 4.1, 4.2, 4.3, 4.4, 4.5, 4.6, 4.7, 4.8, 4.9, 5, 5.1, 5.2, 5.3, 5.4, 5.5, 5.6, 5.7, 5.8, 5.9, 6, 6.1, 6.2, 6.3, 6.4, 6.5, 6.6, 6.7, 6.8, 6.9, 7, 7.1, 7.2, 7.3, 7.4, 7.5, 7.6, 7.7, 7.8, 7.9, 8, 8.1, 8.2, 8.3, 8.4, 8.5, 8.6, 8.7, 8.8, 8.9, 9, 9.1, 9.2, 9.3, 9.4, 9.5, 9.6, 9.7, 9.8, 9.9, or about 10 mg/kg. Values and ranges intermediate to the recited values are also intended to be part of this invention.

[0629] In other embodiments, for example, when a composition of the invention comprises a dsRNA as described herein and an N-acetylgalactosamine, subjects can be administered a therapeutic amount of iRNA, such as a dose of about 0.1 to about 50 mg/kg, about 0.25 to about 50 mg/kg, about 0.5 to about 50 mg/kg, about 0.75 to about 50 mg/kg, about 1 to about 50 mg/mg, about 1.5 to about 50 mg/kb, about 2 to about 50 mg/kg, about 2.5 to about 50 mg/kg, about 3 to about 50 mg/kg, about 3.5 to about 50 mg/kg, about 4 to about 50 mg/kg, about 4.5 to about 50 mg/kg, about 5 to about 50 mg/kg, about 7.5 to about 50 mg/kg, about 10 to about 50 mg/kg, about 15 to about 50 mg/kg, about 20 to about 50 mg/kg, about 20 to about 50 mg/kg, about 25 to about 50 mg/kg, about 25 to about 50 mg/kg, about 30 to about 50 mg/kg, about 35 to about 50 mg/kg, about 40 to about 50 mg/kg, about 45 to about 50 mg/kg, about 0.1 to about 45 mg/kg, about 0.25 to about 45 mg/kg, about 0.5 to about 45 mg/kg, about 0.75 to about 45 mg/kg, about 1 to about 45 mg/mg, about 1.5 to about 45 mg/kb, about 2 to about 45 mg/kg, about 2.5 to about 45 mg/kg, about 3 to about 45 mg/kg, about 3.5 to about 45 mg/kg, about 4 to about 45 mg/kg, about 4.5 to about 45 mg/kg, about 5 to about 45 mg/kg, about 7.5 to about 45 mg/kg, about 10 to about 45 mg/kg, about 15 to about 45 mg/kg, about 20 to about 45 mg/kg, about 20 to about 45 mg/kg, about 25 to about 45 mg/kg, about 25 to about 45 mg/kg, about 30 to about 45 mg/kg, about 35 to about 45 mg/kg, about 40 to about 45 mg/kg, about 0.1 to about 40 mg/kg, about 0.25 to about 40 mg/kg, about 0.5 to about 40 mg/kg, about 0.75 to about 40 mg/kg, about 1 to about 40 mg/mg, about 1.5 to about 40 mg/kb, about 2 to about 40 mg/kg, about 2.5 to about 40 mg/kg, about 3 to about 40 mg/kg, about 3.5 to about 40 mg/kg, about 4 to about 40 mg/kg, about 4.5 to about 40 mg/kg, about 5 to about 40 mg/kg, about 7.5 to about 40 mg/kg, about 10 to about 40 mg/kg, about 15 to about 40 mg/kg, about 20 to about 40 mg/kg, about 20 to about 40 mg/kg, about 25 to about 40 mg/kg, about 25 to about 40 mg/kg, about 30 to about 40 mg/kg, about 35 to about 40 mg/kg, about 0.1 to about 30 mg/kg, about 0.25 to about 30 mg/kg, about 0.5 to about 30 mg/kg, about 0.75 to about 30 mg/kg, about 1 to about 30 mg/mg, about 1.5 to about 30 mg/kb, about 2 to about 30 mg/kg, about 2.5 to about 30 mg/kg, about 3 to about 30 mg/kg, about 3.5 to about 30 mg/kg, about 4 to about 30 mg/kg, about 4.5 to about 30 mg/kg, about 5 to about 30 mg/kg, about 7.5 to about 30 mg/kg, about 10 to about 30 mg/kg, about 15 to about 30 mg/kg, about 20 to about 30 mg/kg, about 20 to about 30 mg/kg, about 25 to about 30 mg/kg, about 0.1 to about 20 mg/kg, about 0.25 to about 20 mg/kg, about 0.5 to about 20 mg/kg, about 0.75 to about 20 mg/kg, about 1 to about 20 mg/mg, about 1.5 to about 20 mg/kb, about 2 to about 20 mg/kg, about 2.5 to about 20 mg/kg, about 3 to about 20 mg/kg, about 3.5 to about 20 mg/kg, about 4 to about 20 mg/kg, about 4.5 to about 20 mg/kg, about 5 to about 20 mg/kg, about 7.5 to about 20 mg/kg, about 10 to about 20 mg/kg, or about 15 to about 20 mg/kg. In one embodiment, when a composition of the invention comprises a dsRNA as described herein and an N-acetylgalactosamine, subjects can be administered a therapeutic amount of about 10 to about 30 mg/kg of dsRNA. Values and ranges intermediate to the recited values are also intended to be part of this invention.

[0630] For example, subjects can be administered a therapeutic amount of iRNA, such as about 0.1, 0.2, 0.3, 0.4, 0.5, 0.6, 0.7, 0.8, 0.9, 1, 1.1, 1.2, 1.3, 1.4, 1.5, 1.6, 1.7, 1.8, 1.9, 2, 2.1, 2.2, 2.3, 2.4, 2.5, 2.6, 2.7, 2.8, 2.9, 3, 3.1, 3.2, 3.3, 3.4, 3.5, 3.6, 3.7, 3.8, 3.9, 4, 4.1, 4.2, 4.3, 4.4, 4.5, 4.6, 4.7, 4.8, 4.9, 5, 5.1, 5.2, 5.3, 5.4, 5.5, 5.6, 5.7, 5.8, 5.9, 6, 6.1, 6.2, 6.3, 6.4, 6.5, 6.6, 6.7, 6.8, 6.9, 7, 7.1, 7.2, 7.3, 7.4, 7.5, 7.6, 7.7, 7.8, 7.9, 8, 8.1, 8.2, 8.3, 8.4, 8.5, 8.6, 8.7, 8.8, 8.9, 9, 9.1, 9.2, 9.3, 9.4, 9.5, 9.6, 9.7, 9.8, 9.9, 10, 10.5, 11, 11.5, 12, 12.5, 13, 13.5, 14, 14.5, 15, 15.5, 16, 16.5, 17, 17.5, 18, 18.5, 19, 19.5, 20, 20.5, 21, 21.5, 22, 22.5, 23, 23.5, 24, 24.5, 25, 25.5, 26, 26.5, 27, 27.5, 28, 28.5, 29, 29.5, 30, 31, 32, 33, 34, 34, 35, 36, 37, 38, 39, 40, 41, 42, 43, 44, 45, 46, 47, 48, 49, or about 50 mg/kg. Values and ranges intermediate to the recited values are also intended to be part of this invention.

[0631] In some embodiments, the RNAi agent is administered as a fixed dose of between about 25 mg to about 900 mg, e.g., between about 25 mg to about 850 mg, between about 25 mg to about 500 mg, between about 25 mg to about 400 mg, between about 25 mg to about 300 mg, between about 50 mg to about 850 mg, between about 50 mg to about 500 mg, between about 50 mg to about 400 mg, between about 50 mg to about 300 mg, between about 100 mg to about 850 mg, between about 100 mg to about 500 mg, between about 100 mg to about 400 mg, between about 100 mg to about 300 mg, between about 200 mg to about 850 mg, between about 200 mg to about 500 mg, between about 200 mg to about 400 mg, between about 200 mg to about 300 mg, between about 100 mg to about 800 mg, between about 100 mg to about 750 mg, between about 100 mg to about 700 mg, between about 100 mg to about 650 mg, between about 100 mg to about 600 mg, between about 100 mg to about 550 mg, between about 100 mg to about 500 mg, between about 200 mg to about 850 mg, between about 200 mg to about 800 mg, between about 200 mg to about 750 mg, between about 200 mg to about 700 mg, between about 200 mg to about 650 mg, between about 200 mg to about 600 mg, between about 200 mg to about 550 mg, between about 200 mg to about 500 mg, between about 300 mg to about 850 mg, between about 300 mg to about 800 mg, between about 300 mg to about 750 mg, between about 300 mg to about 700 mg, between about 300 mg to about 650 mg, between about 300 mg to about 600 mg, between about 300 mg to about 550 mg, between about 300 mg to about 500 mg, between about 400 mg to about 850 mg, between about 400 mg to about 800 mg, between about 400 mg to about 750 mg, between about 400 mg to about 700 mg, between about 400 mg to about 650 mg, between about 400 mg to about 600 mg, between about 400 mg to about 550 mg, or between about 400 mg to about 500 mg.

[0632] In some embodiments, the RNAi agent is administered as a fixed dose of about 25 mg, about 50 mg, about 75 mg, about 100 mg, about 125 mg, about 150 mg, about 175 mg, 200 mg, about 225 mg, about 250 mg, about 275 mg, about 300 mg, about 325 mg, about 350 mg, about 375 mg, about 400 mg, about 425 mg, about 450 mg, about 475 mg, about 500 mg, about 525 mg, about 550 mg, about 575 mg, about 600 mg, about 625 mg, about 650 mg, about 675 mg, about 700 mg, about 725 mg, about 750 mg, about 775 mg, about 800 mg, about 825 mg, about 850 mg, about 875 mg, or about 900 mg.

[0633] The iRNA can be administered by intravenous infusion over a period of time, such as over a 5, 6, 7, 8, 9, 10, 11, 12, 13, 14, 15, 16, 17, 18, 19, 20, 21, 22, 23, 24, or about a 25 minute period. The administration may be repeated, for example, on a regular basis, such as weekly, biweekly (i.e., every two weeks) for one month, two months, three months, four months or longer. After an initial treatment regimen, the treatments can be administered on a less frequent basis. For example, after administration weekly or biweekly for three months, administration can be repeated once per month, for six months or a year or longer.

[0634] Administration of the iRNA can reduce C5 levels, e.g., in a cell, tissue, blood, urine or other compartment of the patient by at least about 5%, 6%, 7%, 8%, 9%, 10%, 11%, 12%, 13%, 14%, 15%, 16%, 17%, 18%, 19%, 20%, 21%, 22%, 23%, 24%, 25%, 26%, 27%, 28%, 29%, 30%, 31%, 32%, 33%, 34%, 35%, 36%, 37%, 38%, 39%, 40%, 41%, 42%, 43%, 44%, 45%, 46%, 47%, 48%, 49%, 50%, 51%, 52%, 53%, 54%, 55%, 56%, 57%, 58%, 59%, 60%, 61%, 62%, 63%, 64%, 65%, 66%, 67%, 68%, 69%, 70%, 71%, 72%, 73%, 74%, 75%, 76%, 77%, 78%, 79%, 80%, 81%, 82%, 83%, 84%, 85%, 86%, 87%, 88%, 89%, 90%, 91%, 92%, 93%, 94%, 95%, 96%, 97%, 98%, or at least about 99% or more.

[0635] Before administration of a full dose of the iRNA, patients can be administered a smaller dose, such as a 5% infusion, and monitored for adverse effects, such as an allergic reaction. In another example, the patient can be monitored for unwanted immunostimulatory effects, such as increased cytokine (e.g., TNF-alpha or INF-alpha) levels.

[0636] Owing to the inhibitory effects on C5 expression, a composition according to the invention or a pharmaceutical composition prepared therefrom can enhance the quality of life.

[0637] An iRNA of the invention may be administered in “naked” form, or as a “free iRNA.” A naked iRNA is administered in the absence of a pharmaceutical composition. The naked iRNA may be in a suitable buffer solution. The buffer solution may comprise acetate, citrate, prolamine, carbonate, or phosphate, or any combination thereof. In one embodiment, the buffer solution is phosphate buffered saline (PBS). The pH and osmolarity of the buffer solution containing the iRNA can be adjusted such that it is suitable for administering to a subject.

[0638] Alternatively, an iRNA of the invention may be administered as a pharmaceutical composition, such as a dsRNA liposomal formulation.

[0639] Subjects that would benefit from a reduction and/or inhibition of C5gene expression are those having a complement component C5-associated disease or disorder as described herein. In one embodiment, a subject having a complement component C5-associated disease has paroxysmal nocturnal hemoglobinuria (PNH). In another embodiment, a subject having a complement component C5-associated disease has asthma. In another embodiment, a subject having a complement component C5-associated disease has rheumatoid arthritis. In yet another embodiment, a subject having a complement component C5-associated disease has systemic lupus erythmatosis. In one embodiment, a subject having a complement component C5-associated disease has glomerulonephritis. In another embodiment, a subject having a complement component C5-associated disease has psoriasis. In yet another embodiment, a subject having a complement component C5-associated disease has dermatomyositis bullous pemphigoid. In one embodiment, a subject having a complement component C5-associated disease has atypical hemolytic uremic syndrome. In another embodiment, a subject having a complement component C5-associated disease has Shiga toxin E. coli-related hemolytic uremic syndrome. In another embodiment, a subject having a complement component C5-associated disease has myasthenia gravis. In yet another embodiment, a subject having a complement component C5-associated disease has neuromyelistis optica. In one embodiment, a subject having a complement component C5-associated disease has dense deposit disease. In one embodiment, a subject having a complement component C5-associated disease has C3 neuropathy. In another embodiment, a subject having a complement component C5-associated disease has age-related macular degeneration. In another embodiment, a subject having a complement component C5-associated disease has cold agglutinin disease. In one embodiment, a subject having a complement component C5-associated disease has anti-neutrophil cytoplasmic antibody-associated vasculitis. In another embodiment, a subject having a complement component C5-associated disease has humoral and vascular transplant rejection. In one embodiment, a subject having a complement component C5-associated disease has graft dysfunction. In one embodiment, a subject having a complement component C5-associated disease has had a myocardial infarction. In another embodiment, a subject having a complement component C5-associated disease is a sensitized recipient of a transplant. In yet another embodiment, a subject having a complement component C5-associated disease has sepsis.

[0640] In one embodiment, a subject having a complement component C5-associated disease, e.g., PNH, aHUS, neuromyelitis optica (NMO), or myasthenia gravis is an incomplete responder or non-responder to anti-complement component C5 antibody (e.g., eculizumab) therapy. For example, an incomplete responder or non-responder may be transfusion dependent due to chronic persistent extravascular hemolysis. The subject may be CD55 deficient. A “non-responder” to anti-complement component C5 antibody (e.g., eculizumab) therapy is a subject failing at least to have a hematologic response after 6 to 8 weeks of therapy, e.g., a subject that remains transfusion dependent. In one embodiment, an incomplete responder or non-responder to anti-complement component C5 antibody (e.g., eculizumab) therapy is a subject who is receiving a label dose of eculizumab and who is either experiencing ongoing uncontrolled intravascular hemolysis resulting in LDH>1.5×ULN or one or more of the following: any clinical PNH symptoms (e.g., fatigue, abdominal pain, dyspnea, dysphagia or rectile dysfunction); remains transfusion dependent; remains anemic with HGB<10 g/dL; develops a major vascular event (e.g., thrombosis).

[0641] Treatment of a subject that would benefit from a reduction and/or inhibition of C5 gene expression includes therapeutic and prophylactic (e.g., the subject is to undergo sensitized (or allogenic) transplant surgery) treatment.

[0642] The invention further provides methods and uses of an iRNA agent or a pharmaceutical composition thereof (including methods and uses of an iRNA agent or a pharmaceutical composition comprising an iRNA agent and an anti-complement component C5 antibody, or antigen-bidning fragment thereof) for treating a subject that would benefit from reduction and/or inhibition of C5 expression, e.g., a subject having a complement component C5-associated disease, in combination with other pharmaceuticals and/or other therapeutic methods, e.g., with known pharmaceuticals and/or known therapeutic methods, such as, for example, those which are currently employed for treating these disorders. For example, in certain embodiments, an iRNA targeting C5 is administered in combination with, e.g., an agent useful in treating a complement component C5-associated disease as described elsewhere herein.

[0643] For example, additional therapeutics and therapeutic methods suitable for treating a subject that would benefit from reduction in C5 expression, e.g., a subject having a complement component C5-associated disease, include plasmaphoresis, thrombolytic therapy (e.g., streptokinase), antiplatelet agents, folic acid, corticosteroids; immunosuppressive agents; estrogens, methotrexate, 6-MP, azathioprine sulphasalazine, mesalazine, olsalazine, chloroquinine/hydroxychloroquine, pencillamine, aurothiomalate (intramuscular and oral), azathioprine, cochicine, corticosteroids (oral, inhaled and local injection), beta-2 adrenoreceptor agonists (salbutamol, terbutaline, salmeteral), xanthines (theophylline, aminophylline), cromoglycate, nedocromil, ketotifen, ipratropium and oxitropium, cyclosporin, FK506, rapamycin, mycophenolate mofetil, leflunomide, NSAIDs, for example, ibuprofen, corticosteroids such as prednisolone, phosphodiesterase inhibitors, adensosine agonists, antithrombotic agents, complement inhibitors, adrenergic agents, agents which interfere with signalling by proinflammatory cytokines, such as TNF-α or IL-1 (e.g., IRAK, NIK, IKK, p38 or MAP kinase inhibitors), IL-1β converting enzyme inhibitors, TNFαconverting enzyme (TACE) inhibitors, T-cell signalling inhibitors, such as kinase inhibitors, metalloproteinase inhibitors, sulfasalazine, azathioprine, 6-mercaptopurines, angiotensin converting enzyme inhibitors, soluble cytokine receptors and derivatives thereof (e.g., soluble p55 or p75 TNF receptors and the derivatives p75TNFRIgG (Enbrel™ and p55TNFRIgG (Lenercept)), sIL-1RI, sIL-1RII, and sIL-6R), antiinflammatory cytokines (e.g., IL-4, IL-10, IL-11, IL-13 and TGFβ), celecoxib, folic acid, hydroxychloroquine sulfate, rofecoxib, etanercept, infliximonoclonal antibody, naproxen, valdecoxib, sulfasalazine, methylprednisolone, meloxicam, methylprednisolone acetate, gold sodium thiomalate, aspirin, triamcinolone acetonide, propoxyphene napsylate/apap, folate, nabumetone, diclofenac, piroxicam, etodolac, diclofenac sodium, oxaprozin, oxycodone hcl, hydrocodone bitartrate/apap, diclofenac sodium/misoprostol, fentanyl, anakinra, human recombinant, tramadol hcl, salsalate, sulindac, cyanocobalamin/fa/pyridoxine, acetaminophen, alendronate sodium, prednisolone, morphine sulfate, lidocaine hydrochloride, indomethacin, glucosamine sulf/chondroitin, amitriptyline hcl, sulfadiazine, oxycodone hcl/acetaminophen, olopatadine hcl, misoprostol, naproxen sodium, omeprazole, cyclophosphamide, rituximonoclonal antibody, IL-1 TRAP, MRA, CTLA4-IG, IL-18 BP, anti-IL-18, Anti-IL15, BIRB-796, SCIO-469, VX-702, AMG-548, VX-740, Roflumilast, IC-485, CDC-801, Mesopram, cyclosporine, cytokine suppressive anti-inflammatory drug(s) (C5AIDs); CDP-571/BAY-10-3356 (humanized anti-TNFα antibody; Celltech/Bayer); cA2/infliximonoclonal antibody (chimeric anti-TNFα antibody; Centocor); 75 kdTNFR-IgG/etanercept (75 kD TNF receptor-IgG fusion protein; Immunex; see e.g., (1994) Arthr. Rheum. 37: S295; (1996) J. Invest. Med. 44: 235A); 55 kdTNF-IgG (55 kD TNF receptor-IgG fusion protein; Hoffmann-LaRoche); IDEC-CE9.1/SB 210396 (non-depleting primatized anti-CD4 antibody; IDEC/SmithKline; see e.g., (1995) Arthr. Rheum. 38: S185); DAB 486-IL-2 and/or DAB 389-IL-2 (IL-2 fusion proteins; Seragen; see e.g., (1993) Arthrit. Rheum. 36: 1223); Anti-Tac (humanized anti-IL-2Rα; Protein Design Labs/Roche); IL-4 (anti-inflammatory cytokine; DNAX/Schering); IL-10 (SCH 52000; recombinant IL-10, anti-inflammatory cytokine; DNAX/Schering); IL-4; IL-10 and/or IL-4 agonists (e.g., agonist antibodies); IL-1RA (IL-1 receptor antagonist; Synergen/Amgen); anakinra (Kineret®/Amgen); TNF-bp/s-TNF (soluble TNF binding protein; see e.g., (1996) Arthr. Rheum. 39(9 (supplement)): S284; (1995) Amer. J. Physiol.—Heart and Circ. Physiol. 268: 37-42); R973401 (phosphodiesterase Type IV inhibitor; see e.g., (1996) Arthr. Rheum. 39(9 (supplement): S282); MK-966 (COX-2 Inhibitor; see e.g., (1996) Arthr. Rheum. 39(9 (supplement): S81); Iloprost (see e.g., (1996) Arthr. Rheum. 39(9 (supplement): S82); methotrexate; thalidomide (see e.g., (1996) Arthr. Rheum. 39(9 (supplement): S282) and thalidomide-related drugs (e.g., Celgen); leflunomide (anti-inflammatory and cytokine inhibitor; see e.g., (1996) Arthr. Rheum. 39(9 (supplement): S131; (1996) Inflamm. Res. 45: 103-107); tranexamic acid (inhibitor of plasminogen activation; see e.g., (1996) Arthr. Rheum. 39(9 (supplement): S284); T-614 (cytokine inhibitor; see e.g., (1996) Arthr. Rheum. 39(9 (supplement): S282); prostaglandin E1 (see e.g., (1996) Arthr. Rheum. 39(9 (supplement): S282); Tenidap (non-steroidal anti-inflammatory drug; see e.g., (1996) Arthr. Rheum. 39(9 (supplement): S280); Naproxen (non-steroidal anti-inflammatory drug; see e.g., (1996) Neuro. Report 7: 1209-1213); Meloxicam (non-steroidal anti-inflammatory drug); Ibuprofen (non-steroidal anti-inflammatory drug); Piroxicam (non-steroidal anti-inflammatory drug); Diclofenac (non-steroidal anti-inflammatory drug); Indomethacin (non-steroidal anti-inflammatory drug); Sulfasalazine (see e.g., (1996) Arthr. Rheum. 39(9 (supplement): S281); Azathioprine (see e.g., (1996) Arthr. Rheum. 39(9 (supplement): S281); ICE inhibitor (inhibitor of the enzyme interleukin-1β converting enzyme); zap-70 and/or lck inhibitor (inhibitor of the tyrosine kinase zap-70 or lck); VEGF inhibitor and/or VEGF-R inhibitor (inhibitors of vascular endothelial cell growth factor or vascular endothelial cell growth factor receptor; inhibitors of angiogenesis); corticosteroid anti-inflammatory drugs (e.g., SB203580); TNF-convertase inhibitors; anti-IL-12 antibodies; anti-IL-18 antibodies; interleukin-11 (see e.g., (1996) Arthr. Rheum. 39(9 (supplement): S296); interleukin-13 (see e.g., (1996) Arthr. Rheum. 39(9 (supplement): S308); interleukin-17 inhibitors (see e.g., (1996) Arthr. Rheum. 39(9 (supplement): S120); gold; penicillamine; chloroquine; chlorambucil; hydroxychloroquine; cyclosporine; cyclophosphamide; total lymphoid irradiation; anti-thymocyte globulin; anti-CD4 antibodies; CD5-toxins; orally-administered peptides and collagen; lobenzarit disodium; Cytokine Regulating Agents (CRAs) HP228 and HP466 (Houghten Pharmaceuticals, Inc.); ICAM-1 antisense phosphorothioate oligo-deoxynucleotides (ISIS 2302; Isis Pharmaceuticals, Inc.); soluble complement receptor 1 (TP10; T Cell Sciences, Inc.); prednisone; orgotein; glycosaminoglycan polysulphate; minocycline; anti-IL2R antibodies; marine and botanical lipids (fish and plant seed fatty acids; see e.g., DeLuca et al. (1995) Rheum. Dis. Clin. North Am. 21: 759-777); auranofin; phenylbutazone; meclofenamic acid; flufenamic acid; intravenous immune globulin; zileuton; azaribine; mycophenolic acid (RS-61443); tacrolimus (FK-506); sirolimus (rapamycin); amiprilose (therafectin); cladribine (2-chlorodeoxyadenosine); methotrexate; bcl-2 inhibitors (see Bruncko, M. et al. (2007) J. Med. Chem. 50(4): 641-662); antivirals and immune-modulating agents, small molecule inhibitor of KDR, small molecule inhibitor of Tie-2; methotrexate; prednisone; celecoxib; folic acid; hydroxychloroquine sulfate; rofecoxib; etanercept; infliximonoclonal antibody; leflunomide; naproxen; valdecoxib; sulfasalazine; methylprednisolone; ibuprofen; meloxicam; methylprednisolone acetate; gold sodium thiomalate; aspirin; azathioprine; triamcinolone acetonide; propxyphene napsylate/apap; folate; nabumetone; diclofenac; piroxicam; etodolac; diclofenac sodium; oxaprozin; oxycodone hcl; hydrocodone bitartrate/apap; diclofenac sodium/misoprostol; fentanyl; anakinra, human recombinant; tramadol hcl; salsalate; sulindac; cyanocobalamin/fa/pyridoxine; acetaminophen; alendronate sodium; prednisolone; morphine sulfate; lidocaine hydrochloride; indomethacin; glucosamine sulfate/chondroitin; cyclosporine; amitriptyline hcl; sulfadiazine; oxycodone hcl/acetaminophen; olopatadine hcl; misoprostol; naproxen sodium; omeprazole; mycophenolate mofetil; cyclophosphamide; rituximonoclonal antibody; IL-1 TRAP; MRA; CTLA4-IG; IL-18 BP; IL-12/23; anti-IL 18; anti-IL 15; BIRB-796; SCIO-469; VX-702; AMG-548; VX-740; Roflumilast; IC-485; CDC-801; mesopram, albuterol, salmeterol/fluticasone, montelukast sodium, fluticasone propionate, budesonide, prednisone, salmeterol xinafoate, levalbuterol hcl, albuterol sulfate/ipratropium, prednisolone sodium phosphate, triamcinolone acetonide, beclomethasone dipropionate, ipratropium bromide, azithromycin, pirbuterol acetate, prednisolone, theophylline anhydrous, methylprednisolone sodium succinate, clarithromycin, zafirlukast, formoterol fumarate, influenza virus vaccine, methylprednisolone, amoxicillin trihydrate, flunisolide, allergy injection, cromolyn sodium, fexofenadine hydrochloride, flunisolide/menthol, amoxicillin/clavulanate, levofloxacin, inhaler assist device, guaifenesin, dexamethasone sodium phosphate, moxifloxacin hcl, doxycycline hyclate, guaifenesin/d-methorphan, p-ephedrine/cod/chlorphenir, gatifloxacin, cetirizine hydrochloride, mometasone furoate, salmeterol xinafoate, benzonatate, cephalexin, pe/hydrocodone/chlorphenir, cetirizine hcl/pseudoephed, phenylephrine/cod/promethazine, codeine/promethazine, cefprozil, dexamethasone, guaifenesin/pseudoephedrine, chlorpheniramine/hydrocodone, nedocromil sodium, terbutaline sulfate, epinephrine, methylprednisolone, metaproterenol sulfate, aspirin, nitroglycerin, metoprolol tartrate, enoxaparin sodium, heparin sodium, clopidogrel bisulfate, carvedilol, atenolol, morphine sulfate, metoprolol succinate, warfarin sodium, lisinopril, isosorbide mononitrate, digoxin, furosemide, simvastatin, ramipril, tenecteplase, enalapril maleate, torsemide, retavase, losartan potassium, quinapril hcl/mag carb, bumetanide, alteplase, enalaprilat, amiodarone hydrochloride, tirofiban hcl m-hydrate, diltiazem hydrochloride, captopril, irbesartan, valsartan, propranolol hydrochloride, fosinopril sodium, lidocaine hydrochloride, eptifibatide, cefazolin sodium, atropine sulfate, aminocaproic acid, spironolactone, interferon, sotalol hydrochloride, potassium chloride, docusate sodium, dobutamine hcl, alprazolam, pravastatin sodium, atorvastatin calcium, midazolam hydrochloride, meperidine hydrochloride, isosorbide dinitrate, epinephrine, dopamine hydrochloride, bivalirudin, rosuvastatin, ezetimibe/simvastatin, avasimibe, and cariporide.

[0644] The iRNA agent (and/or an anti-complement component C5 antibody) and an additional therapeutic agent and/or treatment may be administered at the same time and/or in the same combination, e.g., parenterally, or the additional therapeutic agent can be administered as part of a separate composition or at separate times and/or by another method known in the art or described herein.

[0645] In one embodiment, a subject is administered an initial dose and one or more maintenance doses of an RNAi agent. The maintenance dose or doses can be the same or lower than the initial dose, e.g., one-half of the initial dose. A maintenance regimen can include treating the subject with a dose or doses ranging from about 10 mg to about 900 mg, e.g., about 10 mg, about 15 mg, about 20 mg, about 25 mg, about 50 mg, about 75 mg, about 100 mg, about 125 mg, about 150 mg, about 175 mg, 200 mg, about 225 mg, about 250 mg, about 275 mg, about 300 mg, about 325 mg, about 350 mg, about 375 mg, about 400 mg, about 425 mg, about 450 mg, about 475 mg, about 500 mg, about 525 mg, about 550 mg, about 575 mg, about 600 mg, about 625 mg, about 650 mg, about 675 mg, about 700 mg, about 725 mg, about 750 mg, about 775 mg, about 800 mg, about 825 mg, about 850 mg, about 875 mg, or about 900 mg per week. The maintenance doses are, for example, administered no more than once every 7 days, once every 10 days, once every 14 days, once every 21 days, or once every 30 days. Further, the treatment regimen may last for a period of time which will vary depending upon the nature of the particular disease, its severity and the overall condition of the patient.

[0646] The present invention also provides methods of using an iRNA agent of the invention and/or a composition containing an iRNA agent of the invention to reduce and/or inhibit complement component C5 expression in a cell. In other aspects, the present invention provides an iRNA of the invention and/or a composition comprising an iRNA of the invention for use in reducing and/or inhibiting C5 expression in a cell. In yet other aspects, use of an iRNA of the invention and/or a composition comprising an iRNA of the invention for the manufacture of a medicament for reducing and/or inhibiting C5 expression in a cell are provided.

[0647] The methods and uses include contacting the cell with an iRNA, e.g., a dsRNA, of the invention and maintaining the cell for a time sufficient to obtain degradation of the mRNA transcript of a C5 gene, thereby inhibiting expression of the C5 gene in the cell.

[0648] Reduction in gene expression can be assessed by any methods known in the art. For example, a reduction in the expression of C5 may be determined by determining the mRNA expression level of C5 using methods routine to one of ordinary skill in the art, e.g., Northern blotting, qRT-PCR, by determining the protein level of C5 using methods routine to one of ordinary skill in the art, such as Western blotting, immunological techniques, flow cytometry methods, ELISA, and/or by determining a biological activity of C5, such as CH₅₀ or AH₅₀ hemolysis assay, and/or by determining the biological activity of one or more molecules associated with the complement system, e.g., C5 products, such as C5a and C5b (or, in an in vivo setting, e.g., hemolysis).

[0649] In the methods and uses of the invention the cell may be contacted in vitro or in vivo, i.e., the cell may be within a subject. In embodiments of the invention in which the cell is within a subject, the methods may include further contacting the cell with an anti-complement component C5 antibody, e.g., eculizumab.

[0650] A cell suitable for treatment using the methods of the invention may be any cell that expresses a C5 gene. A cell suitable for use in the methods and uses of the invention may be a mammalian cell, e.g., a primate cell (such as a human cell or a non-human primate cell, e.g., a monkey cell or a chimpanzee cell), a non-primate cell (such as a cow cell, a pig cell, a camel cell, a llama cell, a horse cell, a goat cell, a rabbit cell, a sheep cell, a hamster, a guinea pig cell, a cat cell, a dog cell, a rat cell, a mouse cell, a lion cell, a tiger cell, a bear cell, or a buffalo cell), a bird cell (e.g., a duck cell or a goose cell), or a whale cell. In one embodiment, the cell is a human cell, e.g., a human liver cell.

[0651] C5 expression may be inhibited in the cell by at least about 5%, 6%, 7%, 8%, 9%, 10%, 11%, 12%, 13%, 14%, 15%, 16%, 17%, 18%, 19%, 20%, 21%, 22%, 23%, 24%, 25%, 26%, 27%, 28%, 29%, 30%, 31%, 32%, 33%, 34%, 35%, 36%, 37%, 38%, 39%, 40%, 41%, 42%, 43%, 44%, 45%, 46%, 47%, 48%, 49%, 50%, 51%, 52%, 53%, 54%, 55%, 56%, 57%, 58%, 59%, 60%, 61%, 62%, 63%, 64%, 65%, 66%, 67%, 68%, 69%, 70%, 71%, 72%, 73%, 74%, 75%, 76%, 77%, 78%, 79%, 80%, 81%, 82%, 83%, 84%, 85%, 86%, 87%, 88%, 89%, 90%, 91%, 92%, 93%, 94%, 95%, 96%, 97%, 98%, 99%, or about 100%.

[0652] The in vivo methods and uses of the invention may include administering to a subject a composition containing an iRNA, where the iRNA includes a nucleotide sequence that is complementary to at least a part of an RNA transcript of the C5 gene of the mammal to be treated. When the organism to be treated is a mammal such as a human, the composition can be administered by any means known in the art including, but not limited to subcutaneous, intravenous, oral, intraperitoneal, or parenteral routes, including intracranial (e.g., intraventricular, intraparenchymal and intrathecal), intramuscular, transdermal, airway (aerosol), nasal, rectal, and topical (including buccal and sublingual) administration. In certain embodiments, the compositions are administered by subcutaneous or intravenous infusion or injection.

[0653] In some embodiments, the administration is via a depot injection. A depot injection may release the iRNA in a consistent way over a prolonged time period. Thus, a depot injection may reduce the frequency of dosing needed to obtain a desired effect, e.g., a desired inhibition of C5, or a therapeutic or prophylactic effect. A depot injection may also provide more consistent serum concentrations. Depot injections may include subcutaneous injections or intramuscular injections. In preferred embodiments, the depot injection is a subcutaneous injection.

[0654] In some embodiments, the administration is via a pump. The pump may be an external pump or a surgically implanted pump. In certain embodiments, the pump is a subcutaneously implanted osmotic pump. In other embodiments, the pump is an infusion pump. An infusion pump may be used for intravenous, subcutaneous, arterial, or epidural infusions. In preferred embodiments, the infusion pump is a subcutaneous infusion pump. In other embodiments, the pump is a surgically implanted pump that delivers the iRNA to the liver.

[0655] The mode of administration may be chosen based upon whether local or systemic treatment is desired and based upon the area to be treated. The route and site of administration may be chosen to enhance targeting.

[0656] In one aspect, the present invention also provides methods for inhibiting the expression of a C5 gene in a mammal, e.g., a human. The present invention also provides a composition comprising an iRNA, e.g., a dsRNA, that targets a C5 gene in a cell of a mammal for use in inhibiting expression of the C5 gene in the mammal. In another aspect, the present invention provides use of an iRNA, e.g., a dsRNA, that targets a C5 gene in a cell of a mammal in the manufacture of a medicament for inhibiting expression of the C5 gene in the mammal.

[0657] The methods and uses include administering to the mammal, e.g., a human, a composition comprising an iRNA, e.g., a dsRNA, that targets a C5 gene in a cell of the mammal and maintaining the mammal for a time sufficient to obtain degradation of the mRNA transcript of the C5 gene, thereby inhibiting expression of the C5 gene in the mammal. In some embodiment, the methods further comprise administering an anti-complement component C5 antibody, e.g., eculizumab, to the subject.

[0658] Reduction in gene expression can be assessed by any methods known it the art and by methods, e.g. qRT-PCR, described herein. Reduction in protein production can be assessed by any methods known it the art and by methods, e.g., ELISA or Western blotting, described herein. In one embodiment, a puncture liver biopsy sample serves as the tissue material for monitoring the reduction in C5 gene and/or protein expression. In another embodiment, a blood sample serves as the tissue material for monitoring the reduction in C5 gene and/or protein expression. In other embodiments, inhibition of the expression of a C5 gene is monitored indirectly by, for example, determining the expression and/or activity of a gene in a C5 pathway, including, for example, C5a, C5b, and soluble C5b-9 (see, e.g., FIG. 1). For example, the activity of CD59 may be monitored to determine the inhibition of expression of a C5 gene. CH₅₀, AH₅₀, clot formation and/or serum lactate dehydrogenase (LDH), in a sample, e.g., a blood or liver sample, may also be measured. Suitable assays are further described in the Examples section below.

[0659] Unless otherwise defined, all technical and scientific terms used herein have the same meaning as commonly understood by one of ordinary skill in the art to which this invention belongs. Although methods and materials similar or equivalent to those described herein can be used in the practice or testing of the iRNAs and methods featured in the invention, suitable methods and materials are described below. All publications, patent applications, patents, and other references mentioned herein are incorporated by reference in their entirety. In case of conflict, the present specification, including definitions, will control. In addition, the materials, methods, and examples are illustrative only and not intended to be limiting.

### EXAMPLES

### Example 1. iRNA Synthesis

### Source of Reagents

[0660] Where the source of a reagent is not specifically given herein, such reagent can be obtained from any supplier of reagents for molecular biology at a quality/purity standard for application in molecular biology.

### Transcripts

[0661] siRNA design was carried out to identify siRNAs targeting human, rhesus (Macaca mulatta), mouse, and rat C5 transcripts annotated in the NCBI Gene database (http://www.ncbi.nlm.nih.gov/gene/). Design used the following transcripts from the NCBI RefSeq collection: Human—NM_001735.2; Rhesus—XM_001095750.2; Mouse—NM_010406.2; Rat—XM_345342.4. SiRNA duplexes were designed in several separate batches, including but not limited to batches containing duplexes matching human and rhesus transcripts only; human, rhesus, and mouse transcripts only; human, rhesus, mouse, and rat transcripts only; and mouse and rat transcripts only. All siRNA duplexes were designed that shared 100% identity with the listed human transcript and other species transcripts considered in each design batch (above).

siRNA Design, Specificity, and Efficacy Prediction

[0662] The predicted specificity of all possible 19mers was predicted from each sequence. Candidate 19mers were then selected that lacked repeats longer than 7 nucleotides. These 2971 candidate human/rhesus, 142 human/rhesus/mouse, 54 human/rhesus/mouse/rat, and 807 mouse/rat siRNAs were used in comprehensive searches against the appropriate transcriptomes (defined as the set of NM_ and XM_records within the human, rhesus, dog, mouse, or rat NCBI Refseq sets) using an exhaustive “brute-force” algorithm implemented in the python script ‘BruteForce.py’. The script next parsed the transcript-oligo alignments to generate a score based on the position and number of mismatches between the siRNA and any potential ‘off-target’ transcript. The off-target score is weighted to emphasize differences in the ‘seed’ region of siRNAs, in positions 2-9 from the 5′-end of the molecule.

[0663] Each oligo-transcript pair from the brute-force search was given a mismatch score by summing the individual mismatch scores; mismatches in the position 2-9 were counted as 2.8, mismatches in the cleavage site positions 10-11 were counted as 1.2, and mismatches in region 12-19 counted as 1.0. An additional off-target prediction was carried out by comparing the frequency of heptamers and octomers derived from 3 distinct, seed-derived hexamers of each oligo. The hexamers from positions 2-7 relative to the 5′ start were used to create 2 heptamers and one octamer. ‘Heptamer1’ was created by adding a 3′-A to the hexamer; heptamer2 was created by adding a 5′-A to the hexamer; the octomer was created by adding an A to both 5′- and 3′-ends of the hexamer. The frequency of octamers and heptamers in the human, rhesus, mouse, or rat 3′-UTRome (defined as the subsequence of the transcriptome from NCBI's Refseq database where the end of the coding region, the ‘CDS’, is clearly defined) was pre-calculated. The octamer frequency was normalized to the heptamer frequency using the median value from the range of octamer frequencies. A ‘mirSeedScore’ was then calculated by calculating the sum of ((3×normalized octamer count)+(2×heptamer2 count)+(1×heptamer1 count)).

[0664] Both siRNAs strands were assigned to a category of specificity according to the calculated scores: a score above 3 qualifies as highly specific, equal to 3 as specific and between 2.2 and 2.8 as moderately specific. The duplexes were sorted by the specificity of the antisense strand and those duplexes whose antisense oligos lacked GC at the first position, lacked G at both positions 13 and 14, and had 3 or more Us or As in the seed region were selected.

[0665] For GalNaC-conjugated duplexes, sense 21mer and antisense 23mer oligos were designed by extending antisense 19mers (described above) to 23 nucleotides of target-complementary sequence. All species transcripts included in the design batch were checked for complementarity. Only 23mers that preserved 100% sequence complementarity in at least 2 species were used. For each duplex, the sense 21mer was specified as the reverse complement of the first 21 nucleotides of the antisense strand. siRNA sequence selection

[0666] A total of 23 sense and 23 antisense derived human/rhesus, 6 sense and 6 antisense human/rhesus/mouse, 6 sense and 6 antisense derived human/rhesus/mouse/mouse/rat, and 13 sense and 13 antisense derived mouse/rat siRNA 19mer oligos were synthesized and formed into duplexes.

[0667] The above 19mer sets were extended to 21/23mer duplexes for GalNac conjugate design and re-classified according to their new species matches. Twenty-seven sense and 27 antisense derived human/rhesus, 1 sense and 1 sense derived human/rhesus/mouse, 3 sense and 3 antisense derived human/rhesus/rat, 4 sense and 4 antisense derived human/rhesus/mouse/rat, and 13 sense and 13 antisense derived mouse/rat 21mer (sense) and 23mer (antisense) oligos were synthesized and formed into duplexes.

[0668] A detailed list of C5 sense and antisense strand sequences is shown in Tables 3-6. siRNA Synthesis

[0669] General Small and Medium Scale RNA Synthesis Procedure

[0670] RNA oligonucleotides were synthesized at scales between 0.2-500 μmol using commercially available 5′-O-(4,4′-dimethoxytrityl)-2′-O-t-butyldimethylsilyl-3′-O-(2-cyanoethyl-N,N-diisopropyl)phosphoramidite monomers of uridine, 4-N-acetylcytidine, 6-N-benzoyladenosine and 2-N-isobutyrylguanosine and the corresponding 2′-O-methyl and 2′-fluoro phosphoramidites according to standard solid phase oligonucleotide synthesis protocols. The amidite solutions were prepared at 0.1-0.15 M concentration and 5-ethylthio-1H-tetrazole (0.25-0.6 M in acetonitrile) was used as the activator. Phosphorothioate backbone modifications were introduced during synthesis using 0.2 M phenylacetyl disulfide (PADS) in lutidine:acetonitrile (1:1) (v;v) or 0.1 M 3-(dimethylaminomethylene) amino-3H-1,2,4-dithiazole-5-thione (DDTT) in pyridine for the oxidation step. After completion of synthesis, the sequences were cleaved from the solid support and deprotected using methylamine followed by triethylamine.3HF to remove any 2′-O-t-butyldimethylsilyl protecting groups present.

[0671] For synthesis scales between 5-500 μmol and fully 2′ modified sequences (2′-fluoro and/or 2′-O-methyl or combinations thereof) the oligonucleotides where deprotected using 3:1 (v/v) ethanol and concentrated (28-32%) aqueous ammonia either at 35° C. 16 h or 55° C. for 5.5 h. Prior to ammonia deprotection the oligonucleotides where treated with 0.5 M piperidine in acetonitrile for 20 min on the solid support. The crude oligonucleotides were analyzed by LC-MS and anion-exchange HPLC (IEX-HPLC). Purification of the oligonucleotides was carried out by IEX HPLC using: 20 mM phosphate, 10%-15% ACN, pH=8.5 (buffer A) and 20 mM phosphate, 10%-15% ACN, 1 M NaBr, pH=8.5 (buffer B). Fractions were analyzed for purity by analytical HPLC. The product-containing fractions with suitable purity were pooled and concentrated on a rotary evaporator prior to desalting. The samples were desalted by size exclusion chromatography and lyophilized to dryness. Equal molar amounts of sense and antisense strands were annealed in 1×PBS buffer to prepare the corresponding siRNA duplexes.

[0672] For small scales (0.2-1 μmol), synthesis was performed on a MerMade 192 synthesizer in a 96 well format. In case of fully 2′-modified sequences (2′-fluoro and/or 2′-O-methyl or combinations thereof) the oligonucleotides where deprotected using methylamine at room temperature for 30-60 min followed by incubation at 60° C. for 30 min or using 3:1 (v/v) ethanol and concentrated (28-32%) aqueous ammonia at room temperature for 30-60 min followed by incubation at 40° C. for 1.5 hours. The crude oligonucleotides were then precipitated in a solution of acetonitrile:acetone (9:1) and isolated by centrifugation and decanting the supernatant. The crude oligonucleotide pellet was re-suspended in 20 mM NaOAc buffer and analyzed by LC-MS and anion exchange HPLC. The crude oligonucleotide sequences were desalted in 96 deep well plates on a 5 mL HiTrap Sephadex G25 column (GE Healthcare). In each well about 1.5 mL samples corresponding to an individual sequence was collected. These purified desalted oligonucleotides were analyzed by LC-MS and anion exchange chromatography. Duplexes were prepared by annealing equimolar amounts of sense and antisense sequences on a Tecan robot. Concentration of duplexes was adjusted to 10 μM in 1×PBS buffer.

### Synthesis of GalNAc-Conjugated Oligonucleotides for In Vivo Analysis

[0673] Oligonucleotides conjugated with GalNAc ligand at their 3′-terminus were synthesized at scales between 0.2-500 μmol using a solid support pre-loaded with a Y-shaped linker bearing a 4,4′-dimethoxytrityl (DMT)-protected primary hydroxy group for oligonucleotide synthesis and a GalNAc ligand attached through a tether.

[0674] For synthesis of GalNAc conjugates in the scales between 5-500 μmol, the above synthesis protocol for RNA was followed with the following adaptions: For polystyrene-based synthesis supports 5% dichloroacetic acid in toluene was used for DMT-cleavage during synthesis. Cleavage from the support and deprotection was performed as described above. Phosphorothioate-rich sequences (usually >5 phorphorothioates) were synthesized without removing the final 5′-DMT group (“DMT-on”) and, after cleavage and deprotection as described above, purified by reverse phase HPLC using 50 mM ammonium acetate in water (buffer A) and 50 mM ammoniumacetate in 80% acetonitirile (buffer B). Fractions were analyzed for purity by analytical HPLC and/or LC-MS. The product-containing fractions with suitable purity were pooled and concentrated on a rotary evaporator. The DMT-group was removed using 20%-25% acetic acid in water until completion. The samples were desalted by size exclusion chromatography and lyophilized to dryness. Equal molar amounts of sense and antisense strands were annealed in 1×PBS buffer to prepare the corresponding siRNA duplexes.

[0675] For small scale synthesis of GalNAc conjugates (0.2-1 μmol), including sequences with multiple phosphorothioate linkages, the protocols described above for synthesis of RNA or fully 2′-F/2′-OMe-containing sequences on MerMade platform were applied. Synthesis was performed on pre-packed columns containing GalNAc-functionalized controlled pore glass support.

### Example 2. In Vitro Screening

### Cell Culture and Transfections

[0676] Hep3B cells (ATCC, Manassas, Va.) were grown to near confluence at 37° C. in an atmosphere of 5% CO2 in Eagle's Minimum Essential Medium (ATCC) supplemented with 10% FBS, streptomycin, and glutamine (ATCC) before being released from the plate by trypsinization. Cells were washed and re-suspended at 0.25×10⁶ cells/ml. During transfections, cells were plated onto a 96-well plate with about 20,000 cells per well.

[0677] Primary mouse hepatocytes (PMH) were freshly isolated from a C57BL/6 female mouse (Charles River Labortories International, Inc. Willmington, Mass.) less than 1 hour prior to transfections and grown in primary hepatocyte media. Cells were resuspended at 0.11×10⁶ cells/ml in InVitroGRO CP Rat (plating) medium (Celsis In Vitro Technologies, catalog number S01494). During transfections, cells were plated onto a BD BioCoat 96 well collagen plate (BD, 356407) at 10,000 cells per well and incubated at 37° C. in an atmosphere of 5% CO₂.

[0678] Cryopreserved Primary Cynomolgus Hepatocytes (Celsis In Vitro Technologies, M003055-P) were thawed at 37° C. water bath immediately prior to usage and re-suspended at 0.26×10⁶ cells/ml in InVitroGRO CP (plating) medium (Celsis In Vitro Technologies, catalog number Z99029). During transfections, cells were plated onto a BD BioCoat 96 well collagen plate (BD, 356407) at 25,000 cells per well and incubated at 37° C. in an atmosphere of 5% CO₂.

[0679] For Hep3B, PMH, and primary Cynomolgus hepatocytes, transfection was carried out by adding 14.8 μl of Opti-MEM plus 0.2 μl of Lipofectamine RNAiMax per well (Invitrogen, Carlsbad Calif. catalog number 13778-150) to 5 μl of each siRNA duplex to an individual well in a 96-well plate. The mixture was then incubated at room temperature for 20 minutes. Eighty μl of complete growth media without antibiotic containing the appropriate cell number were then added to the siRNA mixture. Cells were incubated for 24 hours prior to RNA purification.

[0680] Single dose experiments were performed at 10 nM and 0.1 nM final duplex concentration for GalNAc modified sequences or at 1 nM and 0.01 nM final duplex concentration for all other sequences. Dose response experiments were done at 3, 1, 0.3, 0.1, 0.037, 0.0123, 0.00412, and 0.00137 nM final duplex concentration for primary mouse hepatocytes and at 3, 1, 0.3, 0.1, 0.037, 0.0123, 0.00412, 0.00137, 0.00046, 0.00015, 0.00005, and 0.000017 nM final duplex concentration for Hep3B cells.

### Free Uptake Transfection

[0681] Free uptake experiments were performed by adding 10 μl of siRNA duplexes in PBS per well into a 96 well plate. Ninety μl of complete growth media containing appropriate cell number for the cell type was then added to the siRNA. Cells were incubated for 24 hours prior to RNA purification. Single dose experiments were performed at 500 nM and 5 nM final duplex concentration and dose response experiments were done at 1000, 333, 111, 37, 12.3, 4.12, 1.37, 0.46 nM final duplex concentration.

Total RNA Isolation Using DYNABEADS mRNA Isolation Kit (Invitrogen, Part #: 610-12)

[0682] Cells were harvested and lysed in 150 μl of Lysis/Binding Buffer then mixed for 5 minutes at 850 rpm using an Eppendorf Thermomixer (the mixing speed was the same throughout the process). Ten microliters of magnetic beads and 80 μl Lysis/Binding Buffer mixture were added to a round bottom plate and mixed for 1 minute. Magnetic beads were captured using a magnetic stand and the supernatant was removed without disturbing the beads. After removing the supernatant, the lysed cells were added to the remaining beads and mixed for 5 minutes. After removing the supernatant, magnetic beads were washed 2 times with 150 μl Wash Buffer A and mixed for 1 minute. The beads were captured again and the supernatant was removed. The beads were then washed with 150 μl Wash Buffer B, captured and the supernatant was removed. The beads were next washed with 150 μl Elution Buffer, captured and the supernatant removed. Finally, the beads were allowed to dry for 2 minutes. After drying, 50 μl of Elution Buffer was added and mixed for 5 minutes at 70° C. The beads were captured on magnet for 5 minutes. Forty-five μl of supernatant was removed and added to another 96 well plate.

cDNA Synthesis Using ABI High Capacity cDNA Reverse Transcription Kit (Applied Biosystems, Foster City, Calif., Cat #4368813)

[0683] A master mix of 2 μl 10× Buffer, 0.8 μl 25× dNTPs, 2 μl Random primers, 1 μl Reverse Transcriptase, 1 μl RNase inhibitor and 3.2 μl of H₂O per reaction as prepared. Equal volumes master mix and RNA were mixed for a final volume of 12 μl for in vitro screened or 20 μl for in vivo screened samples. cDNA was generated using a Bio-Rad C-1000 or S-1000 thermal cycler (Hercules, Calif.) through the following steps: 25° C. for 10 minutes, 37° C. for 120 minutes, 85° C. for 5 seconds, and 4° C. hold.

### Real Time PCR

[0684] Two μl of cDNA were added to a master mix containing 2 μl of H₂O, 0.5 μl GAPDH TaqMan Probe (Life Technologies catalog number 4326317E for Hep3B cells, catalog number 352339E for primary mouse hepatocytes or custom probe for cynomolgus primary hepatocytes), 0.5 μl C5 TaqMan probe (Life Technologies c catalog number Hs00156197_ml for Hep3B cells or mm00439275_ml for Primary Mouse Hepatoctyes or custom probe for cynomolgus primary hepatocytes) and 50 Lightcycler 480 probe master mix (Roche catalog number 04887301001) per well in a 384 well plates (Roche catalog number 04887301001). Real time PCR was performed in an Roche LC480 Real Time PCR system (Roche) using the ΔΔCt(RQ) assay. For in vitro screening, each duplex was tested with two biological replicates unless otherwise noted and each Real Time PCR was performed in duplicate technical replicates. For in vivo screening, each duplex was tested in one or more experiments (3 mice per group) and each Real Time PCR was run in duplicate technical replicates.

[0685] To calculate relative fold change in C5 mRNA levels, real time data were analyzed using the ΔΔCt method and normalized to assays performed with cells transfected with 10 nM AD-1955, or mock transfected cells. IC₅₀s were calculated using a 4 parameter fit model using XLFit and normalized to cells transfected with AD-1955 over the same dose range, or to its own lowest dose.

[0686] The sense and antisense sequences of AD-1955 are:

SENSE:

(SEQ ID NO: 13)

cuuAcGcuGAGuAcuucGAdTsdT;
ANTISENSE:

(SEQ ID NO: 14)

UCGAAGuACUcAGCGuAAGdTsdT.

[0687] Table 7 shows the results of a single dose screen in Hep3B cells transfected with the indicated GalNAC conjugated modified iRNAs. Data are expressed as percent of message remaining relative to untreated cells.

[0688] Table 8 shows the results of a single dose transfection screen in primary mouse hepatocytes transfected with the indicated GalNAC conjugated modified iRNAs. Data are expressed as percent of message remaining relative to untreated cells.

[0689] Table 9 shows the results of a single dose free uptake screen in primary Cynomolgus hepatocytes with the indicated GalNAC conjugated modified iRNAs. Data are expressed as percent of message remaining relative to untreated cells.

[0690] Table 10 shows the results of a single dose free uptake screen in primary mouse hepatocytes with the indicated GalNAC conjugated modified iRNAs. Data are expressed as percent of message remaining relative to untreated cells.

[0691] Table 11 shows the dose response of a free uptake screen in primary Cynomolgus hepatocytes with the indicated GalNAC conjugated modified iRNAs. The indicated IC₅₀ values represent the IC₅₀ values relative to untreated cells.

[0692] Table 12 shows the dose response of a free uptake screen in primary mouse hepatocytes with the indicated GalNAC conjugated modified iRNAs. The indicated IC₅₀ values represent the IC₅₀ values relative to untreated cells.

[0693] Table 13 shows the results of a single dose screen in Hep3B cells transfected with the indicated modified and unmodified iRNAs. Data are expressed as percent of message remaining relative to untreated cells. The 0.01 nM dose was a single biological transfection and the 1 nM dose was a duplicate biological transfection.

[0694] Table 14 shows the results of a single dose screen in primary mouse hepatocytes transfected with the indicated modified and unmodified iRNAs. Data are expressed as percent of message remaining relative to untreated cells.

[0695] Table 15 shows the dose response in Hep3B cells transfected with the indicated modified and unmodified iRNAs. The indicated IC₅₀ values represent the IC₅₀ values relative to untreated cells.

[0696] Table 16 shows the dose response in primary mouse hepatocytes transfected with the indicated modified and unmodified iRNAs. The indicated IC₅₀ values represent the IC₅₀ values relative to untreated cells.

TABLE 2
Abbreviations of nucleotide monomers used in nucleic
acid sequence representation. It will be understood that
these monomers, when present in an oligonucleotide, are
mutually linked by 5′-3′-phosphodiester bonds.

| Abbreviation | Nucleotide(s) |
|---|---|
| A | Adenosine-3′-phosphate |
| Af | 2′-fluoroadenosine-3′-phosphate |
| Afs | 2′-fluoroadenosine-3′-phosphorothioate |
| As | adenosine-3′-phosphorothioate |
| C | cytidine-3′-phosphate |
| Cf | 2′-fluorocytidine-3′-phosphate |
| Cfs | 2′-fluorocytidine-3′-phosphorothioate |
| Cs | cytidine-3′-phosphorothioate |
| G | guanosine-3′-phosphate |
| Gf | 2′-fluoroguanosine-3′-phosphate |
| Gfs | 2′-fluoroguanosine-3′-phosphorothioate |
| Gs | guanosine-3′-phosphorothioate |
| T | 5′-methyluridine-3′-phosphate |
| Tf | 2′-fluoro-5-methyluridine-3′-phosphate |
| Tfs | 2′-fluoro-5-methyluridine-3′-phosphorothioate |
| Ts | 5-methyluridine-3′-phosphorothioate |
| U | Uridine-3′-phosphate |
| Uf | 2′-fluorouridine-3′-phosphate |
| Ufs | 2′-fluorouridine-3′-phosphorothioate |
| Us | uridine-3′-phosphorothioate |
| N | any nucleotide (G, A, C, T or U) |
| a | 2′-O-methyladenosine-3′-phosphate |
| as | 2′-O-methyladenosine-3′-phosphorothioate |
| c | 2′-O-methylcytidine-3′-phosphate |
| cs | 2′-O-methylcytidine-3′-phosphorothioate |
| g | 2′-O-methylguanosine-3′-phosphate |
| gs | 2′-O-methylguanosine-3′-phosphorothioate |
| t | 2′-O-methyl-5-methyluridine-3′-phosphate |
| ts | 2′-O-methyl-5-methyluridine-3′-phosphorothioate |
| u | 2′-O-methyluridine-3′-phosphate |
| us | 2′-O-methyluridine-3′-phosphorothioate |
| s | phosphorothioate linkage |
| L96 | N-[tris(GalNAc-alkyl)-amidodecanoyl)]-4-hydroxyprolinol |
| | Hyp-(GalNAc-alkyl)3 |
| (dt) | deoxy-thymine |

TABLE 3
Unmodified Sense and Antisense Strand Sequences of C5 dsRNAs

| | | | | | | SEQ ID | |
|---|---|---|---|---|---|---|---|
| Duplex ID | Sense strand | Sense Unmodified Sequence | SEQ ID NO: | Antisense | Antisense Unmodified Sequence | NO: | Species_Oligo name¹ |
| AD-58093.1² UM³ | A-118310.1 | AAUAACUCACUAUAAUUACUU | 15 | A-118311.1 | AAGUAAUUAUAGUGAGUUAUUUU | 66 | NM_001735.2_1517-1539_as |
| AD-58099.1 UM | A-118312.1 | UGACAAAAUAACUCACUAUAA | 16 | A-118313.1 | UUAUAGUGAGUUAUUUUGUCAAU | 67 | NM_001735.2_1511-1533_as |
| AD-58105.1 UM | A-118314.1 | CUUCCUCUGGAAAUUGGCCUU | 17 | A-118315.1 | AAGGCCAAUUUCCAGAGGAAGCA | 68 | NM_001735.2_2733-2755_as |
| AD-58111.1 UM | A-118316.1 | GACAAAAUAACUCACUAUAAU | 18 | A-118317.1 | AUUAUAGUGAGUUAUUUUGUCAA | 69 | NM_001735.2_1512-1534_as |
| AD-58117.1 UM | A-118318.1 | UCCUCUGGAAAUUGGCCUUCA | 19 | A-118319.1 | UGAAGGCCAAUUUCCAGAGGAAG | 70 | NM_001735.2_2735-2757_as |
| AD-58123.1 UM | A-118320.1 | AAGCAAGAUAUUUUUAUAAUA | 20 | A-118321.1 | UAUUAUAAAAAUAUCUUGCUUUU | 71 | NM_001735.2_784-806_as |
| AD-58129.1 UM | A-118322.1 | AAAAUGUUUUUGUCAAGUACA | 21 | A-118323.1 | UGUACUUGACAAAAACAUUUUCU | 72 | NM_001735.2_4744-4766_as |
| AD-58088.1 UM | A-118324.1 | AUUUAAACAACAAGUACCUUU | 22 | A-118325.1 | AAAGGUACUUGUUGUUUAAAUCU | 73 | NM_001735.2_982-1004_as |
| AD-58094.1 UM | A-118326.1 | AUUCAGAAAGUCUGUGAAGGA | 23 | A-118327.1 | UCCUUCACAGACUUUCUGAAUUU | 74 | NM_001735.2_4578-4600_as |
| AD-58100.1 UM | A-118328.1 | ACACUGAAGCAUUUGAUGCAA | 24 | A-118329.1 | UUGCAUCAAAUGCUUCAGUGUAU | 75 | NM_001735.2_169-191_as |
| AD-58106.1 UM | A-118330.1 | GCAGUUCUGUGUUAAAAUGUC | 25 | A-118331.1 | GACAUUUUAACACAGAACUGCAU | 76 | NM_001735.2_2591-2613_as |
| AD-58112.1 UM | A-118332.1 | AGGAUUUUGAGUGUAAAAGGA | 26 | A-118333.1 | UCCUUUUACACUCAAAAUCCUUU | 77 | NM_001735.2_2955-2977_as |
| AD-58118.1 UM | A-118334.1 | AAUGAUGAACCUUGUAAAGAA | 27 | A-118335.1 | UUCUUUACAAGGUUCAUCAUUUU | 78 | NM_001735.2_2025-2047_as |
| AD-58124.1 UM | A-118336.1 | AUCAUUGGAACAUUUUUCAUU | 28 | A-118337.1 | AAUGAAAAAUGUUCCAAUGAUUU | 79 | NM_001735.2_3118-3140_as |
| AD-58130.1 UM | A-118338.1 | AGCCAGAAAUUCGGAGUUAUU | 29 | A-118339.1 | AAUAACUCCGAAUUUCUGGCUUG | 80 | NM_001735.2_2317-2339_as |
| AD-58089.1 UM | A-118340.1 | UCCCUGGGAGAUAAAACUCAC | 30 | A-118341.1 | GUGAGUUUUAUCUCCCAGGGAAA | 81 | NM_001735.2_3618-3640_as |
| AD-58095.1 UM | A-118342.1 | GAAAAUGAUGAACCUUGUAAA | 31 | A-118343.1 | UUUACAAGGUUCAUCAUUUUCUU | 82 | NM_001735.2_2022-2044_as |
| AD-58101.1 UM | A-118344.1 | AUUGCUCAAGUCACAUUUGAU | 32 | A-118345.1 | AUCAAAUGUGACUUGAGCAAUUC | 83 | NM_001735.2_918-940_as |
| AD-58107.1 UM | A-118346.1 | GAGAUUGCAUAUGCUUAUAAA | 33 | A-118347.1 | UUUAUAAGCAUAUGCAAUCUCUG | 84 | NM_001735.2_4698-4720_as |
| AD-58113.1 UM | A-118348.1 | GUUAUCCUGAUAAAAAAUUUA | 34 | A-118349.1 | UAAAUUUUUUAUCAGGAUAACUU | 85 | NM_001735.2_205-227_as |
| AD-58119.1 UM | A-118350.1 | AGGAAGUUUGCAGCUUUUAUU | 35 | A-118351.1 | AAUAAAAGCUGCAAACUUCCUCA | 86 | NM_001735.2_4147-4169_as |
| AD-58125.1 UM | A-118352.1 | GAAGAAAUUGAUCAUAUUGGA | 36 | A-118353.1 | UCCAAUAUGAUCAAUUUCUUCUA | 87 | NM_001735.2_555-577_as |
| AD-58131.1 UM | A-118354.1 | AUCCUGAUAAAAAAUUUAGUU | 37 | A-118355.1 | AACUAAAUUUUUUAUCAGGAUAA | 88 | NM_001735.2_208-230_as |
| AD-58090.1 UM | A-118356.1 | UGGAAAAGAAAUCUUAGUAAA | 38 | A-118357.1 | UUUACUAAGAUUUCUUUUCCAAA | 89 | NM_001735.2_2786-2808_as |
| AD-58096.1 UM | A-118358.1 | UCUUAUCAAAGUAUAAACAUU | 39 | A-118359.1 | AAUGUUUAUACUUUGAUAAGAUG | 90 | NM_001735.2_1596-1618_as |
| AD-58102.1 UM | A-118360.1 | UCCCUACAAACUGAAUUUGGU | 40 | A-118361.1 | ACCAAAUUCAGUUUGUAGGGAGA | 91 | NM_001735.2_1082-1104_as |
| AD-58108.1 UM | A-118362.1 | CAGGAGCAAACAUAUGUCAUU | 41 | A-118363.1 | AAUGACAUAUGUUUGCUCCUGUC | 92 | NM_001735.2_87-109_as |
| AD-58114.1 UM | A-118364.1 | ACAUGUAACAACUGUAGUUCA | 42 | A-118365.1 | UGAACUACAGUUGUUACAUGUAC | 93 | NM_001735.2_4109-4131_as |
| AD-58120.1 UM | A-118366.1 | CAGGAAAUCAUUGGAACAUUU | 43 | A-118367.1 | AAAUGUUCCAAUGAUUUCCUGUU | 94 | NM_001735.2_3112-3134_as |
| AD-58126.1 UM | A-118368.1 | UUUAAGAAUUUUGAAAUUACU | 44 | A-118369.1 | AGUAAUUUCAAAAUUCUUAAAGU | 95 | NM_001735.2_759-781_as |
| AD-58132.1 UM | A-118370.1 | UAUUCUGCAACUGAAUUCGAU | 45 | A-118371.1 | AUCGAAUUCAGUUGCAGAAUAAC | 96 | NM_001735.2_4412-4434_as |
| AD-58091.1 UM | A-118372.1 | GCCCUUGGAAAGAGUAUUUCA | 46 | A-118373.1 | UGAAAUACUCUUUCCAAGGGCUU | 97 | NM_001735.2_1886-1908_as |
| AD-58097.1 UM | A-118374.1 | CCUGAUAAAAAAUUUAGUUAC | 47 | A-118375.1 | GUAACUAAAUUUUUUAUCAGGAU | 98 | NM_001735.2_210-232_as |
| AD-58103.1 UM | A-118376.1 | CCCUUGGAAAGAGUAUUUCAA | 48 | A-118377.1 | UUGAAAUACUCUUUCCAAGGGCU | 99 | NM_001735.2_1887-1909_as |
| AD-58121.1 UM | A-118382.1 | UGCAGAUCAAACACAAUUUCA | 49 | A-118383.1 | UGAAAUUGUGUUUGAUCUGCAGA | 100 | NM_010406.2_4943-4965_as |
| AD-58133.1 UM | A-118386.1 | CAGAUCAAACACAAUUUCAGU | 50 | A-118387.1 | ACUGAAAUUGUGUUUGAUCUGCA | 101 | NM_010406.2_4945-4967_as |
| AD-58116.1 UM | A-118396.1 | GUUCCGGAUAUUUGAACUUUU | 51 | A-118397.1 | AAAAGUUCAAAUAUCCGGAACCG | 102 | NM_010406.2_4500-4522_as |
| AD-58644.1 UM | A-119328.1 | AUUUAAACAACAAGUACCUUU | 52 | A-119329.1 | AAAGGUACUUGUUGUUUAAAUCU | 103 | NM_001735.2_982-1004_as |
| AD-58651.1 UM | A-119328.2 | AUUUAAACAACAAGUACCUUU | 53 | A-119339.1 | AAAGGUACUUGUUGUUUAAAUCU | 104 | NM_001735.2_982-1004_as |
| AD-58641.1 UM | A-119322.1 | UGACAAAAUAACUCACUAUAA | 54 | A-119323.1 | UUAUAGUGAGUUAUUUUGUCAAU | 105 | NM_001735.2_1511-1533_as |
| AD-58648.1 UM | A-119322.2 | UGACAAAAUAACUCACUAUAA | 55 | A-119336.1 | UUAUAGUGAGUUAUUUUGUCAAU | 106 | NM_001735.2_1511-1533_as |
| AD-58642.1 UM | A-119324.1 | GACAAAAUAACUCACUAUAAU | 56 | A-119325.1 | AUUAUAGUGAGUUAUUUUGUCAA | 107 | NM_001735.2_1512-1534_as |
| AD-58649.1 UM | A-119324.2 | GACAAAAUAACUCACUAUAAU | 57 | A-119337.1 | AUUAUAGUGAGUUAUUUUGUCAA | 108 | NM_001735.2_1512-1534_as |
| AD-58647.1 UM | A-119334.1 | GUUCCGGAUAUUUGAACUUUU | 58 | A-119335.1 | AAAAGUUCAAAUAUCCGGAACCG | 109 | NM_010406.2_4500-4522_as |
| AD-58654.1 UM | A-119334.2 | GUUCCGGAUAUUUGAACUUUU | 59 | A-119342.1 | AAAAGUUCAAAUAUCCGGAACCG | 110 | NM_010406.2_4500-4522_as |
| AD-58645.1 UM | A-119330.1 | UGCAGAUCAAACACAAUUUCA | 60 | A-119331.1 | UGAAAUUGUGUUUGAUCUGCAGA | 111 | NM_010406.2_4943-4965_as |
| AD-58652.1 UM | A-119330.2 | UGCAGAUCAAACACAAUUUCA | 61 | A-119340.1 | UGAAAUUGUGUUUGAUCUGCAGA | 112 | NM_010406.2_4943-4965_as |
| AD-58643.1 UM | A-119326.1 | AAGCAAGAUAUUUUUAUAAUA | 62 | A-119327.1 | UAUUAUAAAAAUAUCUUGCUUUU | 113 | NM_001735.2_784-806_as |
| AD-58650.1 UM | A-119326.2 | AAGCAAGAUAUUUUUAUAAUA | 63 | A-119338.1 | UAUUAUAAAAAUAUCUUGCUUUU | 114 | NM_001735.2_784-806_as |
| AD-58646.1 UM | A-119332.1 | CAGAUCAAACACAAUUUCAGU | 64 | A-119333.1 | ACUGAAAUUGUGUUUGAUCUGCA | 115 | NM_010406.2_4945-4967_as |
| AD-58653.1 UM | A-119332.2 | CAGAUCAAACACAAUUUCAGU | 65 | A-119341.1 | ACUGAAAUUGUGUUUGAUCUGCA | 116 | NM_010406.2_4945-4967_as |

¹The Species Oligo name reflects the GenBank record (e.g., NM_001735.2) and the position in the nucleotide sequence of the GenBank record (e.g., 1517-1539) that the antisense strand targets.
²The number following the decimal point refers to the lot number.
³UM = unmodified

TABLE 4
GalNAC Conujugated Modified Sense and Antisense Strand Sequences of C5 dsRNAs

| | | | SEQ | | | SEQ | |
|---|---|---|---|---|---|---|---|
| | | | ID | | | ID | Species_Oligo |
| Duplex ID | Sense strand | Sense sequence | NO: | Antisense | Antisense sequence | NO: | name⁴ |
| AD-58093.1 | A-118310.1 | AfaUfaAfcUfcAfCfUfaUfaAfuUfaCfuUfL96 | 117 | A-118311.1 | aAfgUfaAfuUfaUfaguGfaGfuUfaUfusUfsu | 168 | |
| AD-58099.1 | A-118312.1 | UfgAfcAfaAfaUfAfAfcUfcAfcUfaUfaAfL96 | 118 | A-118313.1 | uUfaUfaGfuGfaGfuuaUfuUfuGfuCfasAfsu | 169 | |
| AD-58105.1 | A-118314.1 | CfuUfcCfuCfuGfGfAfaAfuUfgGfcCfuUfL96 | 119 | A-118315.1 | aAfgGfcCfaAfuUfuccAfgAfgGfaAfgsCfsa | 170 | |
| AD-58111.1 | A-118316.1 | GfaCfaAfaAfuAfAfCfuCfaCfuAfuAfaUfL96 | 120 | A-118317.1 | aUfuAfuAfgUfgAfguuAfuUfuUfgUfcsAfsa | 171 | |
| AD-58117.1 | A-118318.1 | UfcCfuCfuGfgAfAfAfuUfgGfcCfuUfcAfL96 | 121 | A-118319.1 | uGfaAfgGfcCfaAfuuuCfcAfgAfgGfasAfsg | 172 | |
| AD-58123.1 | A-118320.1 | AfaGfcAfaGfaUfAfUfuUfuUfaUfaAfuAfL96 | 122 | A-118321.1 | uAfuUfaUfaAfaAfauaUfcUfuGfcUfusUfsu | 173 | |
| AD-58129.1 | A-118322.1 | AfaAfaUfgUfuUfUfUfgUfcAfaGfuAfcAfL96 | 123 | A-118323.1 | uGfuAfcUfuGfaCfaaaAfaCfaUfuUfusCfsu | 174 | |
| AD-58088.1 | A-118324.1 | AfuUfuAfaAfcAfAfCfaAfgUfaCfcUfuUfL96 | 124 | A-118325.1 | aAfaGfgUfaCfuUfguuGfuUfuAfaAfusCfsu | 175 | |
| AD-58094.1 | A-118326.1 | AfuUfcAfgAfaAfGfUfcUfgUfgAfaGfgAfL96 | 125 | A-118327.1 | uCfcUfuCfaCfaGfacuUfuCfuGfaAfusUfsu | 176 | |
| AD-58100.1 | A-118328.1 | AfcAfcUfgAfaGfCfAfuUfuGfaUfgCfaAfL96 | 126 | A-118329.1 | uUfgCfaUfcAfaAfugcUfuCfaGfuGfusAfsu | 177 | |
| AD-58106.1 | A-118330.1 | GfcAfgUfuCfuGfUfGfuUfaAfaAfuGfuCfL96 | 127 | A-118331.1 | gAfcAfuUfuUfaAfcacAfgAfaCfuGfcsAfsu | 178 | |
| AD-58112.1 | A-118332.1 | AfgGfaUfuUfuGfAfGfuGfuAfaAfaGfgAfL96 | 128 | A-118333.1 | uCfcUfuUfuAfcAfcucAfaAfaUfcCfusUfsu | 179 | |
| AD-58118.1 | A-118334.1 | AfaUfgAfuGfaAfCfCfuUfgUfaAfaGfaAfL96 | 129 | A-118335.1 | uUfcUfuUfaCfaAfgguUfcAfuCfaUfusUfsu | 180 | |
| AD-58124.1 | A-118336.1 | AfuCfaUfuGfgAfAfCfaUfuUfuUfcAfuUfL96 | 130 | A-118337.1 | aAfuGfaAfaAfaUfguuCfcAfaUfgAfusUfsu | 181 | |
| AD-58130.1 | A-118338.1 | AfgCfcAfgAfaAfUfUfcGfgAfgUfuAfuUfL96 | 131 | A-118339.1 | aAfuAfaCfuCfcGfaauUfuCfuGfgCfusUfsg | 182 | |
| AD-58089.1 | A-118340.1 | UfcCfcUfgGfgAfGfAfuAfaAfaCfuCfaCfL96 | 132 | A-118341.1 | gUfgAfgUfuUfuAfucuCfcCfaGfgGfasAfsa | 183 | |
| AD-58095.1 | A-118342.1 | GfaAfaAfuGfaUfGfAfaCfcUfuGfuAfaAfL96 | 133 | A-118343.1 | uUfuAfcAfaGfgUfucaUfcAfuUfuUfcsUfsu | 184 | |
| AD-58101.1 | A-118344.1 | AfuUfgCfuCfaAfGfUfcAfcAfuUfuGfaUfL96 | 134 | A-118345.1 | aUfcAfaAfuGfuGfacuUfgAfgCfaAfusUfsc | 185 | |
| AD-58107.1 | A-118346.1 | GfaGfaUfuGfcAfUfAfuGfcUfuAfuAfaAfL96 | 135 | A-118347.1 | uUfuAfuAfaGfcAfuauGfcAfaUfcUfcsUfsg | 186 | |
| AD-58113.1 | A-118348.1 | GfuUfaUfcCfuGfAfUfaAfaAfaAfuUfuAfL96 | 136 | A-118349.1 | uAfaAfuUfuUfuUfaucAfgGfaUfaAfcsUfsu | 187 | |
| AD-58119.1 | A-118350.1 | AfgGfaAfgUfuUfGfCfaGfcUfuUfuAfuUfL96 | 137 | A-118351.1 | aAfuAfaAfaGfcUfgcaAfaCfuUfcCfusCfsa | 188 | |
| AD-58125.1 | A-118352.1 | GfaAfgAfaAfuUfGfAfuCfaUfaUfuGfgAfL96 | 138 | A-118353.1 | uCfcAfaUfaUfgAfucaAfuUfuCfuUfcsUfsa | 189 | |
| AD-58131.1 | A-118354.1 | AfuCfcUfgAfuAfAfAfaAfaUfuUfaGfuUfL96 | 139 | A-118355.1 | aAfcUfaAfaUfuUfuuuAfuCfaGfgAfusAfsa | 190 | |
| AD-58090.1 | A-118356.1 | UfgGfaAfaAfgAfAfAfuCfuUfaGfuAfaAfL96 | 140 | A-118357.1 | uUfuAfcUfaAfgAfuuuCfuUfuUfcCfasAfsa | 191 | |
| AD-58096.1 | A-118358.1 | UfcUfuAfuCfaAfAfGfuAfuAfaAfcAfuUfL96 | 141 | A-118359.1 | aAfuGfuUfuAfuAfcuuUfgAfuAfaGfasUfsg | 192 | |
| AD-58102.1 | A-118360.1 | UfcCfcUfaCfaAfAfCfuGfaAfuUfuGfgUfL96 | 142 | A-118361.1 | aCfcAfaAfuUfcAfguuUfgUfaGfgGfasGfsa | 193 | |
| AD-58108.1 | A-118362.1 | CfaGfgAfgCfaAfAfCfaUfaUfgUfcAfuUfL96 | 143 | A-118363.1 | aAfuGfaCfaUfaUfguuUfgCfuCfcUfgsUfsc | 194 | |
| AD-58114.1 | A-118364.1 | AfcAfuGfuAfaCfAfAfcUfgUfaGfuUfcAfL96 | 144 | A-118365.1 | uGfaAfcUfaCfaGfuugUfuAfcAfuGfusAfsc | 195 | |
| AD-58120.1 | A-118366.1 | CfaGfgAfaAfuCfAfUfuGfgAfaCfaUfuUfL96 | 145 | A-118367.1 | aAfaUfgUfuCfcAfaugAfuUfuCfcUfgsUfsu | 196 | |
| AD-58126.1 | A-118368.1 | UfuUfaAfgAfaUfUfUfuGfaAfaUfuAfcUfL96 | 146 | A-118369.1 | aGfuAfaUfuUfcAfaaaUfuCfuUfaAfasGfsu | 197 | |
| AD-58132.1 | A-118370.1 | UfaUfuCfuGfcAfAfCfuGfaAfuUfcGfaUfL96 | 147 | A-118371.1 | aUfcGfaAfuUfcAfguuGfcAfgAfaUfasAfsc | 198 | |
| AD-58091.1 | A-118372.1 | GfcCfcUfuGfgAfAfAfgAfgUfaUfuUfcAfL96 | 148 | A-118373.1 | uGfaAfaUfaCfuCfuuuCfcAfaGfgGfcsUfsu | 199 | |
| AD-58097.1 | A-118374.1 | CfcUfgAfuAfaAfAfAfaUfuUfaGfuUfaCfL96 | 149 | A-118375.1 | gUfaAfcUfaAfaUfuuuUfuAfuCfaGfgsAfsu | 200 | |
| AD-58103.1 | A-118376.1 | CfcCfuUfgGfaAfAfGfaGfuAfuUfuCfaAfL96 | 150 | A-118377.1 | uUfgAfaAfuAfcUfcuuUfcCfaAfgGfgsCfsu | 201 | |
| AD-58121.1 | A-118382.1 | UfgCfaGfaUfcAfAfAfcAfcAfaUfuUfcAfL96 | 151 | A-118383.1 | uGfaAfaUfuGfuGfuuuGfaUfcUfgCfasGfsa | 202 | |
| AD-58133.1 | A-118386.1 | CfaGfaUfcAfaAfCfAfcAfaUfuUfcAfgUfL96 | 152 | A-118387.1 | aCfuGfaAfaUfuGfuguUfuGfaUfcUfgsCfsa | 203 | |
| AD-58116.1 | A-118396.1 | GfuUfcCfgGfaUfAfUfuUfgAfaCfuUfuUfL96 | 153 | A-118397.1 | aAfaAfgUfuCfaAfauaUfcCfgGfaAfcsCfsg | 204 | |
| AD-58644.1 | A-119328.1 | AfsusUfuAfaAfcAfAfCfaAfgUfaCfcUfuUfL96 | 154 | A-119329.1 | asAfsaGfgUfaCfuUfguuGfuUfuAfaAfuscsu | 205 | |
| AD-58651.1 | A-119328.2 | AfsusUfuAfaAfcAfAfCfaAfgUfaCfcUfuUfL96 | 155 | A-119339.1 | asAfsaGfsgUfsaCfsuUfsguuGfsuUfsuAfsaAfsuscsu | 206 | |
| AD-58641.1 | A-119322.1 | UfsgsAfcAfaAfaUfAfAfcUfcAfcUfaUfaAfL96 | 156 | A-119323.1 | usUfsaUfaGfuGfaGfuuaUfuUfuGfuCfasasu | 207 | |
| AD-58648.1 | A-119322.2 | UfsgsAfcAfaAfaUfAfAfcUfcAfcUfaUfaAfL96 | 157 | A-119336.1 | usUfsaUfsaGfsuGfsaGfsuuaUfsuUfsuGfsuCfsasasu | 208 | |
| AD-58642.1 | A-119324.1 | GfsasCfaAfaAfuAfAfCfuCfaCfuAfuAfaUfL96 | 158 | A-119325.1 | asUfsuAfuAfgUfgAfguuAfuUfuUfgUfcsasa | 209 | |
| AD-58649.1 | A-119324.2 | GfsasCfaAfaAfuAfAfCfuCfaCfuAfuAfaUfL96 | 159 | A-119337.1 | asUfsuAfsuAfsgUfsgAfsguuAfsuUfsuUfsgUfscsasa | 210 | |
| AD-58647.1 | A-119334.1 | GfsusUfcCfgGfaUfAfUfuUfgAfaCfuUfuUfL96 | 160 | A-119335.1 | asAfsaAfgUfuCfaAfauaUfcCfgGfaAfcscsg | 211 | |
| AD-58654.1 | A-119334.2 | GfsusUfcCfgGfaUfAfUfuUfgAfaCfuUfuUfL96 | 161 | A-119342.1 | asAfsaAfsgUfsuCfsaAfsauaUfscCfsgGfsaAfscscsg | 212 | |
| AD-58645.1 | A-119330.1 | UfsgsCfaGfaUfcAfAfAfcAfcAfaUfuUfcAfL96 | 162 | A-119331.1 | usGfsaAfaUfuGfuGfuuuGfaUfcUfgCfasgsa | 213 | |
| AD-58652.1 | A-119330.2 | UfsgsCfaGfaUfcAfAfAfcAfcAfaUfuUfcAfL96 | 163 | A-119340.1 | usGfsaAfsaUfsuGfsuGfsuuuGfsaUfscUfsgCfsasgsa | 214 | |
| AD-58643.1 | A-119326.1 | AfsasGfcAfaGfaUfAfUfuUfuUfaUfaAfuAfL96 | 164 | A-119327.1 | usAfsuUfaUfaAfaAfauaUfcUfuGfcUfususu | 215 | |
| AD-58650.1 | A-119326.2 | AfsasGfcAfaGfaUfAfUfuUfuUfaUfaAfuAfL96 | 165 | A-119338.1 | usAfsuUfsaUfsaAfsaAfsauaUfscUfsuGfscUfsususu | 216 | |
| AD-58646.1 | A-119332.1 | CfsasGfaUfcAfaAfCfAfcAfaUfuUfcAfgUfL96 | 166 | A-119333.1 | asCfsuGfaAfaUfuGfuguUfuGfaUfcUfgscsa | 217 | |
| AD-58653.1 | A-119332.2 | CfsasGfaUfcAfaAfCfAfcAfaUfuUfcAfgUfL96 | 167 | A-119341.1 | asCfsuGfsaAfsaUfsuGfsuguUfsuGfsaUfscUfsgscsa | 218 | |

⁴The Species Oligo name and the position in the nucleotide sequence of the GenBank record that the antisense strand targets correspond to those shown in Table 3.

TABLE 5
Unmodified Sense and Antisense Strand Sequences of C5 dsRNAs

| Duplex ID | Sense strand | Sense Unmodified Sequence | SEQ ID NO: | Antisense | Antisense Unmodified Sequence | SEQ ID NO: | Species_Oligo name |
|---|---|---|---|---|---|---|---|
| AD-58143.1 UM | A-118423.1 | CACUAUAAUUACUUGAUUU | 219 | A-118424.1 | AAAUCAAGUAAUUAUAGUG | 302 | NM_001735.2_1522-1540_as |
| AD-58149.1 UM | A-118425.1 | UAACUCACUAUAAUUACUU | 220 | A-118426.1 | AAGUAAUUAUAGUGAGUUA | 303 | NM_001735.2_1517-1535_as |
| AD-58155.1 UM | A-118427.1 | ACAAAAUAACUCACUAUAA | 221 | A-118428.1 | UUAUAGUGAGUUAUUUUGU | 304 | NM_001735.2_1511-1529_as |
| AD-58161.1 UM | A-118429.1 | UCCUCUGGAAAUUGGCCUU | 222 | A-118430.1 | AAGGCCAAUUUCCAGAGGA | 305 | NM_001735.2_2733-2751_as |
| AD-58167.1 UM | A-118431.1 | CAAAAUAACUCACUAUAAU | 223 | A-118432.1 | AUUAUAGUGAGUUAUUUUG | 306 | NM_001735.2_1512-1530_as |
| AD-58173.1 UM | A-118433.1 | CUCUGGAAAUUGGCCUUCA | 224 | A-118434.1 | UGAAGGCCAAUUUCCAGAG | 307 | NM_001735.2_2735-2753_as |
| AD-58179.1 UM | A-118435.1 | GCAAGAUAUUUUUAUAAUA | 225 | A-118436.1 | UAUUAUAAAAAUAUCUUGC | 308 | NM_001735.2_784-802_as |
| AD-58185.1 UM | A-118437.1 | AAUGUUUUUGUCAAGUACA | 226 | A-118438.1 | UGUACUUGACAAAAACAUU | 309 | NM_001735.2_4744-4762_as |
| AD-58144.1 UM | A-118439.1 | UUAAACAACAAGUACCUUU | 227 | A-118440.1 | AAAGGUACUUGUUGUUUAA | 310 | NM_001735.2_982-1000_as |
| AD-58150.1 UM | A-118441.1 | UCAGAAAGUCUGUGAAGGA | 228 | A-118442.1 | UCCUUCACAGACUUUCUGA | 311 | NM_001735.2_4578-4596_as |
| AD-58156.1 UM | A-118443.1 | ACUGAAGCAUUUGAUGCAA | 229 | A-118444.1 | UUGCAUCAAAUGCUUCAGU | 312 | NM_001735.2_169-187_as |
| AD-58162.1 UM | A-118445.1 | AGUUCUGUGUUAAAAUGUC | 230 | A-118446.1 | GACAUUUUAACACAGAACU | 313 | NM_001735.2_2591-2609_as |
| AD-58168.1 UM | A-118447.1 | GAUUUUGAGUGUAAAAGGA | 231 | A-118448.1 | UCCUUUUACACUCAAAAUC | 314 | NM_001735.2_2955-2973_as |
| AD-58174.1 UM | A-118449.1 | UGAUGAACCUUGUAAAGAA | 232 | A-118450.1 | UUCUUUACAAGGUUCAUCA | 315 | NM_001735.2_2025-2043_as |
| AD-58180.1 UM | A-118451.1 | CAUUGGAACAUUUUUCAUU | 233 | A-118452.1 | AAUGAAAAAUGUUCCAAUG | 316 | NM_001735.2_3118-3136_as |
| AD-58186.1 UM | A-118453.1 | CCAGAAAUUCGGAGUUAUU | 234 | A-118454.1 | AAUAACUCCGAAUUUCUGG | 317 | NM_001735.2_2317-2335_as |
| AD-58145.1 UM | A-118455.1 | CCUGGGAGAUAAAACUCAC | 235 | A-118456.1 | GUGAGUUUUAUCUCCCAGG | 318 | NM_001735.2_3618-3636_as |
| AD-58151.1 UM | A-118457.1 | AAAUGAUGAACCUUGUAAA | 236 | A-118458.1 | UUUACAAGGUUCAUCAUUU | 319 | NM_001735.2_2022-2040_as |
| AD-58157.1 UM | A-118459.1 | UGCUCAAGUCACAUUUGAU | 237 | A-118460.1 | AUCAAAUGUGACUUGAGCA | 320 | NM_001735.2_918-936_as |
| AD-58163.1 UM | A-118461.1 | GAUUGCAUAUGCUUAUAAA | 238 | A-118462.1 | UUUAUAAGCAUAUGCAAUC | 321 | NM_001735.2_4698-4716_as |
| AD-58169.1 UM | A-118463.1 | UAUCCUGAUAAAAAAUUUA | 239 | A-118464.1 | UAAAUUUUUUAUCAGGAUA | 322 | NM_001735.2_205-223_as |
| AD-58175.1 UM | A-118465.1 | GAAGUUUGCAGCUUUUAUU | 240 | A-118466.1 | AAUAAAAGCUGCAAACUUC | 323 | NM_001735.2_4147-4165_as |
| AD-58181.1 UM | A-118467.1 | AGAAAUUGAUCAUAUUGGA | 241 | A-118468.1 | UCCAAUAUGAUCAAUUUCU | 324 | NM_001735.2_555-573_as |
| AD-58187.1 UM | A-118469.1 | CCUGAUAAAAAAUUUAGUU | 242 | A-118470.1 | AACUAAAUUUUUUAUCAGG | 325 | NM_001735.2_208-226_as |
| AD-58146.1 UM | A-118471.1 | GAAAAGAAAUCUUAGUAAA | 243 | A-118472.1 | UUUACUAAGAUUUCUUUUC | 326 | NM_001735.2_2786-2804_as |
| AD-58152.1 UM | A-118473.1 | UUAUCAAAGUAUAAACAUU | 244 | A-118474.1 | AAUGUUUAUACUUUGAUAA | 327 | NM_001735.2_1596-1614_as |
| AD-58158.1 UM | A-118475.1 | CCUACAAACUGAAUUUGGU | 245 | A-118476.1 | ACCAAAUUCAGUUUGUAGG | 328 | NM_001735.2_1082-1100_as |
| AD-58164.1 UM | A-118477.1 | GGAGCAAACAUAUGUCAUU | 246 | A-118478.1 | AAUGACAUAUGUUUGCUCC | 329 | NM_001735.2_87-105_as |
| AD-58170.1 UM | A-118479.1 | AUGUAACAACUGUAGUUCA | 247 | A-118480.1 | UGAACUACAGUUGUUACAU | 330 | NM_001735.2_4109-4127_as |
| AD-58176.1 UM | A-118481.1 | GGAAAUCAUUGGAACAUUU | 248 | A-118482.1 | AAAUGUUCCAAUGAUUUCC | 331 | NM_001735.2_3112-3130_as |
| AD-58182.1 UM | A-118483.1 | UAAGAAUUUUGAAAUUACU | 249 | A-118484.1 | AGUAAUUUCAAAAUUCUUA | 332 | NM_001735.2_759-777_as |
| AD-58188.1 UM | A-118485.1 | UUCUGCAACUGAAUUCGAU | 250 | A-118486.1 | AUCGAAUUCAGUUGCAGAA | 333 | NM_001735.2_4412-4430_as |
| AD-58147.1 UM | A-118487.1 | CCUUGGAAAGAGUAUUUCA | 251 | A-118488.1 | UGAAAUACUCUUUCCAAGG | 334 | NM_001735.2_1886-1904_as |
| AD-58153.1 UM | A-118489.1 | UGAUAAAAAAUUUAGUUAC | 252 | A-118490.1 | GUAACUAAAUUUUUUAUCA | 335 | NM_001735.2_210-228_as |
| AD-58159.1 UM | A-118491.1 | CUUGGAAAGAGUAUUUCAA | 253 | A-118492.1 | UUGAAAUACUCUUUCCAAG | 336 | NM_001735.2_1887-1905_as |
| AD-58190.1 UM | A-118519.1 | CACUAUAAUUACUUGAUUU | 254 | A-118520.1 | AAAUCAAGUAAUUAUAGUG | 337 | NM_001735.2_1522-1540_as |
| AD-58196.1 UM | A-118521.1 | UAACUCACUAUAAUUACUU | 255 | A-118522.1 | AAGUAAUUAUAGUGAGUUA | 338 | NM_001735.2_1517-1535_as |
| AD-58202.1 UM | A-118523.1 | ACAAAAUAACUCACUAUAA | 256 | A-118524.1 | UUAUAGUGAGUUAUUUUGU | 339 | NM_001735.2_1511-1529_as |
| AD-58208.1 UM | A-118525.1 | UCCUCUGGAAAUUGGCCUU | 257 | A-118526.1 | AAGGCCAAUUUCCAGAGGA | 340 | NM_001735.2_2733-2751_as |
| AD-58214.1 UM | A-118527.1 | CAAAAUAACUCACUAUAAU | 258 | A-118528.1 | AUUAUAGUGAGUUAUUUUG | 341 | NM_001735.2_1512-1530_as |
| AD-58220.1 UM | A-118529.1 | CUCUGGAAAUUGGCCUUCA | 259 | A-118530.1 | UGAAGGCCAAUUUCCAGAG | 342 | NM_001735.2_2735-2753_as |
| AD-58226.1 UM | A-118531.1 | GCAAGAUAUUUUUAUAAUA | 260 | A-118532.1 | UAUUAUAAAAAUAUCUUGC | 343 | NM_001735.2_784-802_as |
| AD-58231.1 UM | A-118533.1 | AAUGUUUUUGUCAAGUACA | 261 | A-118534.1 | UGUACUUGACAAAAACAUU | 344 | NM_001735.2_4744-4762_as |
| AD-58191.1 UM | A-118535.1 | UUAAACAACAAGUACCUUU | 262 | A-118536.1 | AAAGGUACUUGUUGUUUAA | 345 | NM_001735.2_982-1000_as |
| AD-58197.1 UM | A-118537.1 | UCAGAAAGUCUGUGAAGGA | 263 | A-118538.1 | UCCUUCACAGACUUUCUGA | 346 | NM_001735.2_4578-4596_as |
| AD-58203.1 UM | A-118539.1 | ACUGAAGCAUUUGAUGCAA | 264 | A-118540.1 | UUGCAUCAAAUGCUUCAGU | 347 | NM_001735.2_169-187_as |
| AD-58209.1 UM | A-118541.1 | AGUUCUGUGUUAAAAUGUC | 265 | A-118542.1 | GACAUUUUAACACAGAACU | 348 | NM_001735.2_2591-2609_as |
| AD-58233.1 UM | A-118565.1 | CACUAUAAUUACUUGAUUU | 266 | A-118566.1 | AAAUCAAGUAAUUAUAGUG | 349 | NM_001735.2_1522-1540_as |
| AD-58193.1 UM | A-118567.1 | UAACUCACUAUAAUUACUU | 267 | A-118568.1 | AAGUAAUUAUAGUGAGUUA | 350 | NM_001735.2_1517-1535_as |
| AD-58199.1 UM | A-118569.1 | ACAAAAUAACUCACUAUAA | 268 | A-118570.1 | UUAUAGUGAGUUAUUUUGU | 351 | NM_001735.2_1511-1529_as |
| AD-58205.1 UM | A-118571.1 | UCCUCUGGAAAUUGGCCUU | 269 | A-118572.1 | AAGGCCAAUUUCCAGAGGA | 352 | NM_001735.2_2733-2751_as |
| AD-58211.1 UM | A-118573.1 | CAAAAUAACUCACUAUAAU | 270 | A-118574.1 | AUUAUAGUGAGUUAUUUUG | 353 | NM_001735.2_1512-1530_as |
| AD-58217.1 UM | A-118575.1 | CUCUGGAAAUUGGCCUUCA | 271 | A-118576.1 | UGAAGGCCAAUUUCCAGAG | 354 | NM_001735.2_2735-2753_as |
| AD-58223.1 UM | A-118577.1 | GCAAGAUAUUUUUAUAAUA | 272 | A-118578.1 | UAUUAUAAAAAUAUCUUGC | 355 | NM_001735.2_784-802_as |
| AD-58229.1 UM | A-118579.1 | AAUGUUUUUGUCAAGUACA | 273 | A-118580.1 | UGUACUUGACAAAAACAUU | 356 | NM_001735.2_4744-4762_as |
| AD-58234.1 UM | A-118581.1 | UUAAACAACAAGUACCUUU | 274 | A-118582.1 | AAAGGUACUUGUUGUUUAA | 357 | NM_001735.2_982-1000_as |
| AD-58194.1 UM | A-118583.1 | UCAGAAAGUCUGUGAAGGA | 275 | A-118584.1 | UCCUUCACAGACUUUCUGA | 358 | NM_001735.2_4578-4596_as |
| AD-58200.1 UM | A-118585.1 | ACUGAAGCAUUUGAUGCAA | 276 | A-118586.1 | UUGCAUCAAAUGCUUCAGU | 359 | NM_001735.2_169-187_as |
| AD-58206.1 UM | A-118587.1 | AGUUCUGUGUUAAAAUGUC | 277 | A-118588.1 | GACAUUUUAACACAGAACU | 360 | NM_001735.2_2591-2609_as |
| AD-58236.1 UM | A-118423.2 | CACUAUAAUUACUUGAUUU | 278 | A-118644.1 | AAAUCAAGUAAUUAUAGUG | 361 | NM_001735.2_1522-1540_as |
| AD-58242.1 UM | A-118425.2 | UAACUCACUAUAAUUACUU | 279 | A-118645.1 | AAGUAAUUAUAGUGAGUUA | 362 | NM_001735.2_1517-1535_as |
| AD-58248.1 UM | A-118427.2 | ACAAAAUAACUCACUAUAA | 280 | A-118646.1 | UUAUAGUGAGUUAUUUUGU | 363 | NM_001735.2_1511-1529_as |
| AD-58254.1 UM | A-118429.2 | UCCUCUGGAAAUUGGCCUU | 281 | A-118647.1 | AAGGCCAAUUUCCAGAGGA | 364 | NM_001735.2_2733-2751_as |
| AD-58260.1 UM | A-118431.2 | CAAAAUAACUCACUAUAAU | 282 | A-118648.1 | AUUAUAGUGAGUUAUUUUG | 365 | NM_001735.2_1512-1530_as |
| AD-58266.1 UM | A-118433.2 | CUCUGGAAAUUGGCCUUCA | 283 | A-118649.1 | UGAAGGCCAAUUUCCAGAG | 366 | NM_001735.2_2735-2753_as |
| AD-58272.1 UM | A-118435.2 | GCAAGAUAUUUUUAUAAUA | 284 | A-118650.1 | UAUUAUAAAAAUAUCUUGC | 367 | NM_001735.2_784-802_as |
| AD-58277.1 UM | A-118437.2 | AAUGUUUUUGUCAAGUACA | 285 | A-118651.1 | UGUACUUGACAAAAACAUU | 368 | NM_001735.2_4744-4762_as |
| AD-58237.1 UM | A-118439.2 | UUAAACAACAAGUACCUUU | 286 | A-118652.1 | AAAGGUACUUGUUGUUUAA | 369 | NM_001735.2_982-1000_as |
| AD-58243.1 UM | A-118441.2 | UCAGAAAGUCUGUGAAGGA | 287 | A-118653.1 | UCCUUCACAGACUUUCUGA | 370 | NM_001735.2_4578-4596_as |
| AD-58249.1 UM | A-118443.2 | ACUGAAGCAUUUGAUGCAA | 288 | A-118654.1 | UUGCAUCAAAUGCUUCAGU | 371 | NM_001735.2_169-187_as |
| AD-58255.1 UM | A-118445.2 | AGUUCUGUGUUAAAAUGUC | 289 | A-118655.1 | GACAUUUUAACACAGAACU | 372 | NM_001735.2_2591-2609_as |
| AD-58279.1 UM | A-118423.3 | CACUAUAAUUACUUGAUUU | 290 | A-118667.1 | AAAUCAAGUAAUUAUAGUG | 373 | NM_001735.2_1522-1540_as |
| AD-58239.1 UM | A-118425.3 | UAACUCACUAUAAUUACUU | 291 | A-118668.1 | AAGUAAUUAUAGUGAGUUA | 374 | NM_001735.2_1517-1535_as |
| AD-58245.1 UM | A-118427.3 | ACAAAAUAACUCACUAUAA | 292 | A-118669.1 | UUAUAGUGAGUUAUUUUGU | 375 | NM_001735.2_1511-1529_as |
| AD-58251.1 UM | A-118429.3 | UCCUCUGGAAAUUGGCCUU | 293 | A-118670.1 | AAGGCCAAUUUCCAGAGGA | 376 | NM_001735.2_2733-2751_as |
| AD-58257.1 UM | A-118431.3 | CAAAAUAACUCACUAUAAU | 294 | A-118671.1 | AUUAUAGUGAGUUAUUUUG | 377 | NM_001735.2_1512-1530_as |
| AD-58263.1 UM | A-118433.3 | CUCUGGAAAUUGGCCUUCA | 295 | A-118672.1 | UGAAGGCCAAUUUCCAGAG | 378 | NM_001735.2_2735-2753_as |
| AD-58269.1 UM | A-118435.3 | GCAAGAUAUUUUUAUAAUA | 296 | A-118673.1 | UAUUAUAAAAAUAUCUUGC | 379 | NM_001735.2_784-802_as |
| AD-58275.1 UM | A-118437.3 | AAUGUUUUUGUCAAGUACA | 297 | A-118674.1 | UGUACUUGACAAAAACAUU | 380 | NM_001735.2_4744-4762_as |
| AD-58280.1 UM | A-118439.3 | UUAAACAACAAGUACCUUU | 298 | A-118675.1 | AAAGGUACUUGUUGUUUAA | 381 | NM_001735.2_982-1000_as |
| AD-58240.1 UM | A-118441.3 | UCAGAAAGUCUGUGAAGGA | 299 | A-118676.1 | UCCUUCACAGACUUUCUGA | 382 | NM_001735.2_4578-4596_as |
| AD-58246.1 UM | A-118443.3 | ACUGAAGCAUUUGAUGCAA | 300 | A-118677.1 | UUGCAUCAAAUGCUUCAGU | 383 | NM_001735.2_169-187_as |
| AD-58252.1 UM | A-118445.3 | AGUUCUGUGUUAAAAUGUC | 301 | A-118678.1 | GACAUUUUAACACAGAACU | 384 | NM_001735.2_2591-2609_as |

TABLE 6
Modified Sense and Antisense Strand Sequences of C5 dsRNAs

| Duplex ID | Sense strand | Sense sequence | SEQ ID NO: | Antisense | Antisense sequence | SEQ ID NO: | Species_Oligo name⁵ |
|---|---|---|---|---|---|---|---|
| AD-58143.1 | A-118423.1 | cAcuAuAAuuAcuuGAuuudTsdT | 385 | A-118424.1 | AAAUcAAGuAAUuAuAGUGdTsdT | 468 | |
| AD-58149.1 | A-118425.1 | uAAcucAcuAuAAuuAcuudTsdT | 386 | A-118426.1 | AAGuAAUuAuAGUGAGUuAdTsdT | 469 | |
| AD-58155.1 | A-118427.1 | AcAAAAuAAcucAcuAuAAdTsdT | 387 | A-118428.1 | UuAuAGUGAGUuAUUUUGUdTsdT | 470 | |
| AD-58161.1 | A-118429.1 | uccucuGGAAAuuGGccuudTsdT | 388 | A-118430.1 | AAGGCcAAUUUCcAGAGGAdTsdT | 471 | |
| AD-58167.1 | A-118431.1 | cAAAAuAAcucAcuAuAAudTsdT | 389 | A-118432.1 | AUuAuAGUGAGUuAUUUUGdTsdT | 472 | |
| AD-58173.1 | A-118433.1 | cucuGGAAAuuGGccuucAdTsdT | 390 | A-118434.1 | UGAAGGCcAAUUUCcAGAGdTsdT | 473 | |
| AD-58179.1 | A-118435.1 | GcAAGAuAuuuuuAuAAuAdTsdT | 391 | A-118436.1 | uAUuAuAAAAAuAUCUUGCdTsdT | 474 | |
| AD-58185.1 | A-118437.1 | AAuGuuuuuGucAAGuAcAdTsdT | 392 | A-118438.1 | UGuACUUGAcAAAAAcAUUdTsdT | 475 | |
| AD-58144.1 | A-118439.1 | uuAAAcAAcAAGuAccuuudTsdT | 393 | A-118440.1 | AAAGGuACUUGUUGUUuAAdTsdT | 476 | |
| AD-58150.1 | A-118441.1 | ucAGAAAGucuGuGAAGGAdTsdT | 394 | A-118442.1 | UCCUUcAcAGACUUUCUGAdTsdT | 477 | |
| AD-58156.1 | A-118443.1 | AcuGAAGcAuuuGAuGcAAdTsdT | 395 | A-118444.1 | UUGcAUcAAAUGCUUcAGUdTsdT | 478 | |
| AD-58162.1 | A-118445.1 | AGuucuGuGuuAAAAuGucdTsdT | 396 | A-118446.1 | GAcAUUUuAAcAcAGAACUdTsdT | 479 | |
| AD-58168.1 | A-118447.1 | GAuuuuGAGuGuAAAAGGAdTsdT | 397 | A-118448.1 | UCCUUUuAcACUcAAAAUCdTsdT | 480 | |
| AD-58174.1 | A-118449.1 | uGAuGAAccuuGuAAAGAAdTsdT | 398 | A-118450.1 | UUCUUuAcAAGGUUcAUcAdTsdT | 481 | |
| AD-58180.1 | A-118451.1 | cAuuGGAAcAuuuuucAuudTsdT | 399 | A-118452.1 | AAUGAAAAAUGUUCcAAUGdTsdT | 482 | |
| AD-58186.1 | A-118453.1 | ccAGAAAuucGGAGuuAuudTsdT | 400 | A-118454.1 | AAuAACUCCGAAUUUCUGGdTsdT | 483 | |
| AD-58145.1 | A-118455.1 | ccuGGGAGAuAAAAcucAcdTsdT | 401 | A-118456.1 | GUGAGUUUuAUCUCCcAGGdTsdT | 484 | |
| AD-58151.1 | A-118457.1 | AAAuGAuGAAccuuGuAAAdTsdT | 402 | A-118458.1 | UUuAcAAGGUUcAUcAUUUdTsdT | 485 | |
| AD-58157.1 | A-118459.1 | uGcucAAGucAcAuuuGAudTsdT | 403 | A-118460.1 | AUcAAAUGUGACUUGAGcAdTsdT | 486 | |
| AD-58163.1 | A-118461.1 | GAuuGcAuAuGcuuAuAAAdTsdT | 404 | A-118462.1 | UUuAuAAGcAuAUGcAAUCdTsdT | 487 | |
| AD-58169.1 | A-118463.1 | uAuccuGAuAAAAAAuuuAdTsdT | 405 | A-118464.1 | uAAAUUUUUuAUcAGGAuAdTsdT | 488 | |
| AD-58175.1 | A-118465.1 | GAAGuuuGcAGcuuuuAuudTsdT | 406 | A-118466.1 | AAuAAAAGCUGcAAACUUCdTsdT | 489 | |
| AD-58181.1 | A-118467.1 | AGAAAuuGAucAuAuuGGAdTsdT | 407 | A-118468.1 | UCcAAuAUGAUcAAUUUCUdTsdT | 490 | |
| AD-58187.1 | A-118469.1 | ccuGAuAAAAAAuuuAGuudTsdT | 408 | A-118470.1 | AACuAAAUUUUUuAUcAGGdTsdT | 491 | |
| AD-58146.1 | A-118471.1 | GAAAAGAAAucuuAGuAAAdTsdT | 409 | A-118472.1 | UUuACuAAGAUUUCUUUUCdTsdT | 492 | |
| AD-58152.1 | A-118473.1 | uuAucAAAGuAuAAAcAuudTsdT | 410 | A-118474.1 | AAUGUUuAuACUUUGAuAAdTsdT | 493 | |
| AD-58158.1 | A-118475.1 | ccuAcAAAcuGAAuuuGGudTsdT | 411 | A-118476.1 | ACcAAAUUcAGUUUGuAGGdTsdT | 494 | |
| AD-58164.1 | A-118477.1 | GGAGcAAAcAuAuGucAuudTsdT | 412 | A-118478.1 | AAUGAcAuAUGUUUGCUCCdTsdT | 495 | |
| AD-58170.1 | A-118479.1 | AuGuAAcAAcuGuAGuucAdTsdT | 413 | A-118480.1 | UGAACuAcAGUUGUuAcAUdTsdT | 496 | |
| AD-58176.1 | A-118481.1 | GGAAAucAuuGGAAcAuuudTsdT | 414 | A-118482.1 | AAAUGUUCcAAUGAUUUCCdTsdT | 497 | |
| AD-58182.1 | A-118483.1 | uAAGAAuuuuGAAAuuAcudTsdT | 415 | A-118484.1 | AGuAAUUUcAAAAUUCUuAdTsdT | 498 | |
| AD-58188.1 | A-118485.1 | uucuGcAAcuGAAuucGAudTsdT | 416 | A-118486.1 | AUCGAAUUcAGUUGcAGAAdTsdT | 499 | |
| AD-58147.1 | A-118487.1 | ccuuGGAAAGAGuAuuucAdTsdT | 417 | A-118488.1 | UGAAAuACUCUUUCcAAGGdTsdT | 500 | |
| AD-58153.1 | A-118489.1 | uGAuAAAAAAuuuAGuuAcdTsdT | 418 | A-118490.1 | GuAACuAAAUUUUUuAUcAdTsdT | 501 | |
| AD-58159.1 | A-118491.1 | cuuGGAAAGAGuAuuucAAdTsdT | 419 | A-118492.1 | UUGAAAuACUCUUUCcAAGdTsdT | 502 | |
| AD-58190.1 | A-118519.1 | CACUAUAAUUACUUGAUUUdTdT | 420 | A-118520.1 | AAAUCAAGUAAUUAUAGUGdTdT | 503 | |
| AD-58196.1 | A-118521.1 | UAACUCACUAUAAUUACUUdTdT | 421 | A-118522.1 | AAGUAAUUAUAGUGAGUUAdTdT | 504 | |
| AD-58202.1 | A-118523.1 | ACAAAAUAACUCACUAUAAdTdT | 422 | A-118524.1 | UUAUAGUGAGUUAUUUUGUdTdT | 505 | |
| AD-58208.1 | A-118525.1 | UCCUCUGGAAAUUGGCCUUdTdT | 423 | A-118526.1 | AAGGCCAAUUUCCAGAGGAdTdT | 506 | |
| AD-58214.1 | A-118527.1 | CAAAAUAACUCACUAUAAUdTdT | 424 | A-118528.1 | AUUAUAGUGAGUUAUUUUGdTdT | 507 | |
| AD-58220.1 | A-118529.1 | CUCUGGAAAUUGGCCUUCAdTdT | 425 | A-118530.1 | UGAAGGCCAAUUUCCAGAGdTdT | 508 | |
| AD-58226.1 | A-118531.1 | GCAAGAUAUUUUUAUAAUAdTdT | 426 | A-118532.1 | UAUUAUAAAAAUAUCUUGCdTdT | 509 | |
| AD-58231.1 | A-118533.1 | AAUGUUUUUGUCAAGUACAdTdT | 427 | A-118534.1 | UGUACUUGACAAAAACAUUdTdT | 510 | |
| AD-58191.1 | A-118535.1 | UUAAACAACAAGUACCUUUdTdT | 428 | A-118536.1 | AAAGGUACUUGUUGUUUAAdTdT | 511 | |
| AD-58197.1 | A-118537.1 | UCAGAAAGUCUGUGAAGGAdTdT | 429 | A-118538.1 | UCCUUCACAGACUUUCUGAdTdT | 512 | |
| AD-58203.1 | A-118539.1 | ACUGAAGCAUUUGAUGCAAdTdT | 430 | A-118540.1 | UUGCAUCAAAUGCUUCAGUdTdT | 513 | |
| AD-58209.1 | A-118541.1 | AGUUCUGUGUUAAAAUGUCdTdT | 431 | A-118542.1 | GACAUUUUAACACAGAACUdTdT | 514 | |
| AD-58233.1 | A-118565.1 | CfACfUfAUfAAUfUfACfUfUfGAUfUfUfdTsdT | 432 | A-118566.1 | AAAUCfAAGUfAAUUfAUfAGUGdTsdT | 515 | |
| AD-58193.1 | A-118567.1 | UfAACfUfCfACfUfAUfAAUfUfACfUfUfdTsdT | 433 | A-118568.1 | AAGUfAAUUfAUfAGUGAGUUfAdTsdT | 516 | |
| AD-58199.1 | A-118569.1 | ACfAAAAUfAACfUfCfACfUfAUfAAdTsdT | 434 | A-118570.1 | UUfAUfAGUGAGUUfAUUUUGUdTsdT | 517 | |
| AD-58205.1 | A-118571.1 | UfCfCfUfCfUfGGAAAUfUfGGCfCfUfUfdTsdT | 435 | A-118572.1 | AAGGCCfAAUUUCCfAGAGGAdTsdT | 518 | |
| AD-58211.1 | A-118573.1 | CfAAAAUfAACfUfCfACfUfAUfAAUfdTsdT | 436 | A-118574.1 | AUUfAUfAGUGAGUUfAUUUUGdTsdT | 519 | |
| AD-58217.1 | A-118575.1 | CfUfCfUfGGAAAUfUfGGCfCfUfUfCfAdTsdT | 437 | A-118576.1 | UGAAGGCCfAAUUUCCfAGAGdTsdT | 520 | |
| AD-58223.1 | A-118577.1 | GCfAAGAUfAUfUfUfUfUfAUfAAUfAdTsdT | 438 | A-118578.1 | UfAUUfAUfAAAAAUfAUCUUGCdTsdT | 521 | |
| AD-58229.1 | A-118579.1 | AAUfGUfUfUfUfUfGUfCfAAGUfACfAdTsdT | 439 | A-118580.1 | UGUfACUUGACfAAAAACfAUUdTsdT | 522 | |
| AD-58234.1 | A-118581.1 | UfUfAAACfAACfAAGUfACfCfUfUfUfdTsdT | 440 | A-118582.1 | AAAGGUfACUUGUUGUUUfAAdTsdT | 523 | |
| AD-58194.1 | A-118583.1 | UfCfAGAAAGUfCfUfGUfGAAGGAdTsdT | 441 | A-118584.1 | UCCUUCfACfAGACUUUCUGAdTsdT | 524 | |
| AD-58200.1 | A-118585.1 | ACfUfGAAGCfAUfUfUfGAUfGCfAAdTsdT | 442 | A-118586.1 | UUGCfAUCfAAAUGCUUCfAGUdTsdT | 525 | |
| AD-58206.1 | A-118587.1 | AGUfUfCfUfGUfGUfUfAAAAUfGUfCfdTsdT | 443 | A-118588.1 | GACfAUUUUfAACfACfAGAACUdTsdT | 526 | |
| AD-58236.1 | A-118423.2 | cAcuAuAAuuAcuuGAuuudTsdT | 444 | A-118644.1 | AAAUcAAGuAAUuAuAGuGdTsdT | 527 | |
| AD-58242.1 | A-118425.2 | uAAcucAcuAuAAuuAcuudTsdT | 445 | A-118645.1 | AAGuAAUuAuAGuGAGUuAdTsdT | 528 | |
| AD-58248.1 | A-118427.2 | AcAAAAuAAcucAcuAuAAdTsdT | 446 | A-118646.1 | UuAuAGuGAGUuAuUuuGUdTsdT | 529 | |
| AD-58254.1 | A-118429.2 | uccucuGGAAAuuGGccuudTsdT | 447 | A-118647.1 | AAGGCcAAuUUCcAGAGGAdTsdT | 530 | |
| AD-58260.1 | A-118431.2 | cAAAAuAAcucAcuAuAAudTsdT | 448 | A-118648.1 | AUuAuAGuGAGUuAuUuuGdTsdT | 531 | |
| AD-58266.1 | A-118433.2 | cucuGGAAAuuGGccuucAdTsdT | 449 | A-118649.1 | uGAAGGCcAAuUUCcAGAGdTsdT | 532 | |
| AD-58272.1 | A-118435.2 | GcAAGAuAuuuuuAuAAuAdTsdT | 450 | A-118650.1 | uAUuAuAAAAAuAUCuuGCdTsdT | 533 | |
| AD-58277.1 | A-118437.2 | AAuGuuuuuGucAAGuAcAdTsdT | 451 | A-118651.1 | uGuACuuGAcAAAAAcAuUdTsdT | 534 | |
| AD-58237.1 | A-118439.2 | uuAAAcAAcAAGuAccuuudTsdT | 452 | A-118652.1 | AAAGGuACuuGuuGuUuAAdTsdT | 535 | |
| AD-58243.1 | A-118441.2 | ucAGAAAGucuGuGAAGGAdTsdT | 453 | A-118653.1 | UCCuUcAcAGACuUUCuGAdTsdT | 536 | |
| AD-58249.1 | A-118443.2 | AcuGAAGcAuuuGAuGcAAdTsdT | 454 | A-118654.1 | uuGcAUcAAAuGCuUcAGUdTsdT | 537 | |
| AD-58255.1 | A-118445.2 | AGuucuGuGuuAAAAuGucdTsdT | 455 | A-118655.1 | GAcAuUUuAAcAcAGAACUdTsdT | 538 | |
| AD-58279.1 | A-118423.3 | cAcuAuAAuuAcuuGAuuudTsdT | 456 | A-118667.1 | AAAUCAAGuAAuuAuAgugdTsdT | 539 | |
| AD-58239.1 | A-118425.3 | uAAcucAcuAuAAuuAcuudTsdT | 457 | A-118668.1 | AAGuAAuUAuAGuGAGuuadTsdT | 540 | |
| AD-58245.1 | A-118427.3 | AcAAAAuAAcucAcuAuAAdTsdT | 458 | A-118669.1 | UuAuAGuGAGuuAuuuugudTsdT | 541 | |
| AD-58251.1 | A-118429.3 | uccucuGGAAAuuGGccuudTsdT | 459 | A-118670.1 | AAGGCCAAuUuCCAGAggadTsdT | 542 | |
| AD-58257.1 | A-118431.3 | cAAAAuAAcucAcuAuAAudTsdT | 460 | A-118671.1 | AuUAuAGuGAGuuAuuuugdTsdT | 543 | |
| AD-58263.1 | A-118433.3 | cucuGGAAAuuGGccuucAdTsdT | 461 | A-118672.1 | UGAAGGCCAAuuuCCAgagdTsdT | 544 | |
| AD-58269.1 | A-118435.3 | GcAAGAuAuuuuuAuAAuAdTsdT | 462 | A-118673.1 | UAuUAuAAAAAuAuCuugcdTsdT | 545 | |
| AD-58275.1 | A-118437.3 | AAuGuuuuuGucAAGuAcAdTsdT | 463 | A-118674.1 | UGuACuUGACAAAAACauudTsdT | 546 | |
| AD-58280.1 | A-118439.3 | uuAAAcAAcAAGuAccuuudTsdT | 464 | A-118675.1 | AAAGGuACuUGuuGuuuaadTsdT | 547 | |
| AD-58240.1 | A-118441.3 | ucAGAAAGucuGuGAAGGAdTsdT | 465 | A-118676.1 | UCCuUCACAGACuuuCugadTsdT | 548 | |
| AD-58246.1 | A-118443.3 | AcuGAAGcAuuuGAuGcAAdTsdT | 466 | A-118677.1 | UuGCAUCAAAuGCuuCagudTsdT | 549 | |
| AD-58252.1 | A-118445.3 | AGuucuGuGuuAAAAuGucdTsdT | 467 | A-118678.1 | GACAuUuUAACACAGAacudTsdT | 550 | |

⁵The Species Oligo name and the position in the nucleotide sequence of the GenBank record that the antisense strand targets correspond to those shown in Table 5.

TABLE 7
C5 single dose screen in Hep3B cells
with GalNAC conjugated iRNAs

| | 10 nM | 0.1 nM | 10 nM | 0.1 nM |
|---|---|---|---|---|
| Duplex ID | AVG | AVG | STDEV | STDEV |
| AD-58093.1 | 15.62 | 21.60 | 7.48 | 6.52 |
| AD-58099.1 | 9.07 | 14.70 | 1.18 | 4.65 |
| AD-58105.1 | 36.71 | 60.23 | 5.07 | 19.83 |
| AD-58111.1 | 11.83 | 22.78 | 3.51 | 12.75 |
| AD-58117.1 | 12.43 | 33.46 | 2.00 | 23.56 |
| AD-58123.1 | 8.05 | 15.18 | 2.89 | 7.94 |
| AD-58129.1 | 10.77 | 40.06 | 1.30 | 19.66 |
| AD-58088.1 | 6.55 | 16.40 | 1.24 | 4.58 |
| AD-58094.1 | 19.59 | 40.68 | 7.64 | 12.30 |
| AD-58100.1 | 10.92 | 20.12 | 0.74 | 8.38 |
| AD-58106.1 | 10.97 | 37.23 | 2.49 | 19.95 |
| AD-58112.1 | 13.24 | 29.32 | 2.90 | 14.08 |
| AD-58118.1 | 6.63 | 15.23 | 0.54 | 5.72 |
| AD-58124.1 | 7.17 | 13.00 | 1.44 | 6.48 |
| AD-58130.1 | 10.38 | 17.92 | 2.36 | 6.92 |
| AD-58089.1 | 8.81 | 30.67 | 2.91 | 10.53 |
| AD-58095.1 | 8.72 | 14.66 | 1.04 | 3.37 |
| AD-58101.1 | 8.17 | 19.36 | 1.30 | 5.69 |
| AD-58107.1 | 4.84 | 18.10 | 1.66 | 7.21 |
| AD-58113.1 | 8.78 | 14.62 | 1.77 | 7.89 |
| AD-58119.1 | 8.90 | 15.01 | 0.91 | 7.35 |
| AD-58125.1 | 11.13 | 17.04 | 2.61 | 9.03 |
| AD-58131.1 | 13.50 | 40.14 | 1.08 | 12.07 |
| AD-58090.1 | 7.90 | 21.57 | 2.95 | 6.61 |
| AD-58096.1 | 8.02 | 16.56 | 1.54 | 6.68 |
| AD-58102.1 | 12.40 | 27.93 | 1.83 | 11.78 |
| AD-58108.1 | 12.02 | 15.07 | 2.88 | 5.74 |
| AD-58114.1 | 11.86 | 25.05 | 1.48 | 9.46 |
| AD-58120.1 | 7.65 | 10.57 | 0.58 | 3.56 |
| AD-58126.1 | 8.45 | 15.39 | 2.08 | 7.42 |
| AD-58132.1 | 8.50 | 19.26 | 2.52 | 9.38 |
| AD-58091.1 | 8.68 | 18.05 | 2.95 | 6.62 |
| AD-58097.1 | 9.31 | 23.02 | 0.67 | 10.10 |
| AD-58103.1 | 8.53 | 17.23 | 2.90 | 7.27 |
| AD-1955 | 57.41 | 81.16 | 10.76 | 5.29 |
| Mock | 78.61 | 75.97 | 5.70 | 2.76 |
| Untreated | 100 | 100 | 6.13 | 5.98 |

TABLE 8
C5 single dose transfection screen in primary
mouse hepatocytes with GalNAC conjugated iRNAs

| | 10 nM | 0.1 nM | 10 nM | 0.1 nM |
|---|---|---|---|---|
| Duplex ID | AVG | AVG | STDEV | STDEV |
| AD-58093.1 | 1.53 | 1.65 | 0.17 | 0.25 |
| AD-58099.1 | 1.65 | 1.50 | 0.61 | 0.22 |
| AD-58105.1 | 11.20 | 46.95 | 0.08 | 3.89 |
| AD-58111.1 | 2.49 | 2.13 | 0.26 | 0.20 |
| AD-58117.1 | 3.57 | 31.91 | 0.93 | 0.62 |
| AD-58123.1 | 4.29 | 2.97 | 0.11 | 2.22 |
| AD-58129.1 | 1.19 | 8.53 | 0.23 | 0.72 |
| AD-58088.1 | 0.84 | 1.34 | 0.68 | 0.07 |
| AD-58094.1 | 11.34 | 66.82 | 0.17 | 3.01 |
| AD-58100.1 | 2.78 | 1.51 | 0.43 | 0.33 |
| AD-58106.1 | 6.79 | 52.91 | 4.42 | 6.78 |
| AD-58121.1 | 1.94 | 2.15 | 0.04 | 0.91 |
| AD-58133.1 | 1.74 | 3.25 | 0.19 | 1.64 |
| AD-58116.1 | 1.76 | 2.21 | 1.27 | 0.78 |
| AD-1955 | 87.39 | 91.71 | 5.77 | 4.68 |
| Mock | 79.67 | 89.02 | 1.51 | 3.91 |
| Untreated | 100 | 100 | 6.39 | 13.11 |

TABLE 9
C5 single dose screen in primary Cynomolgus
hepatocytes with GalNAC conjugated iRNAs

| | 500 nM | 5 nM | 500 nM | 5 nM |
|---|---|---|---|---|
| Duplex ID | AVG | AVG | STDEV | STDEV |
| AD-58093.1 | 63.94 | 83.09 | 2.14 | 12.65 |
| AD-58099.1 | 61.34 | 85.85 | 12.32 | 21.95 |
| AD-58105.1 | 91.98 | 97.57 | 6.09 | 11.48 |
| AD-58111.1 | 71.27 | 92.28 | 1.93 | 12.72 |
| AD-58117.1 | 73.42 | 88.82 | 3.24 | 11.08 |
| AD-58123.1 | 75.14 | 73.06 | 7.72 | 9.71 |
| AD-58129.1 | 81.66 | 90.62 | 2.13 | 4.77 |
| AD-58088.1 | 53.63 | 87.03 | 5.93 | 19.86 |
| AD-58094.1 | 89.62 | 93.65 | 0.87 | 14.76 |
| AD-58100.1 | 79.56 | 96.70 | 4.31 | 1.10 |
| AD-58106.1 | 116.24 | 125.99 | 14.28 | 40.65 |
| AD-58112.1 | 97.19 | 107.81 | N/A | 3.13 |
| AD-58118.1 | 67.40 | 97.38 | 5.28 | 22.64 |
| AD-58124.1 | 58.04 | 96.14 | 8.72 | 10.64 |
| AD-58130.1 | 84.19 | 88.65 | 10.50 | 4.34 |
| AD-58089.1 | 83.83 | 83.44 | 1.91 | 12.26 |
| AD-58095.1 | 58.53 | 78.02 | 15.07 | 12.45 |
| AD-58101.1 | 76.68 | 76.73 | 3.95 | 6.35 |
| AD-58107.1 | 57.37 | 86.78 | 14.71 | 2.99 |
| AD-58113.1 | 37.79 | 71.10 | 8.27 | 7.76 |
| AD-58119.1 | 36.77 | 83.16 | 3.42 | 9.66 |
| AD-58125.1 | 72.40 | 96.53 | 4.46 | 4.96 |
| AD-58131.1 | 95.58 | 101.69 | 10.17 | 2.21 |
| AD-58090.1 | 56.37 | 75.00 | 3.21 | 4.97 |
| AD-58096.1 | 44.33 | 57.99 | 11.46 | 25.17 |
| AD-58102.1 | 95.46 | 89.35 | 0.83 | 1.76 |
| AD-58108.1 | 41.54 | 56.41 | 8.41 | 0.14 |
| AD-58114.1 | 88.32 | 101.88 | 20.02 | 30.29 |
| AD-58120.1 | 37.34 | 56.41 | 0.73 | 2.14 |
| AD-58126.1 | 84.97 | 105.90 | 2.39 | 7.96 |
| AD-58132.1 | 81.55 | 85.12 | 12.93 | 8.94 |
| AD-58091.1 | 78.88 | 84.60 | 44.66 | 17.40 |
| AD-58097.1 | 106.06 | 98.16 | 13.74 | 3.14 |
| AD-58103.1 | 57.21 | 89.46 | 6.40 | 5.93 |
| Untreated | 100 | 100 | 8.77 | 10.33 |

TABLE 10
C5 single dose free uptake screen in primary mouse
hepatocytes with GalNAC conjugated iRNAs

| | 500 nM | 5 nM | 500 nM | 5 nM |
|---|---|---|---|---|
| Duplex ID | AVG | AVG | STDEV | STDEV |
| AD-58093.1 | 31.62 | 64.91 | 7.13 | 8.39 |
| AD-58099.1 | 9.46 | 29.63 | 1.29 | 5.66 |
| AD-58105.1 | 84.77 | 96.41 | 5.22 | 1.89 |
| AD-58111.1 | 17.35 | 50.95 | 1.21 | 3.16 |
| AD-58117.1 | 94.95 | 139.52 | 15.43 | 43.39 |
| AD-58123.1 | 13.07 | 44.58 | 2.11 | 3.49 |
| AD-58129.1 | 68.87 | 85.04 | 2.62 | 4.42 |
| AD-58088.1 | 17.61 | 48.22 | 2.22 | 3.40 |
| AD-58094.1 | 95.92 | 104.23 | 4.16 | 6.53 |
| AD-58100.1 | 34.92 | 61.71 | 1.30 | 2.15 |
| AD-58106.1 | 85.26 | 107.53 | 2.30 | 3.38 |
| AD-58121.1 | 12.88 | 43.76 | 1.41 | 1.28 |
| AD-58133.1 | 20.97 | 42.76 | 0.24 | 0.11 |
| AD-58116.1 | 8.35 | 38.04 | 1.35 | 1.40 |
| Untreated | 100.00 | 100.00 | 3.85 | 4.38 |

TABLE 11
IC₅₀ data in primary Cynomolgus hepatocytes
with GalNAC conjugated iRNAs

| Duplex ID | IC₅₀ (nM) | STDEV |
|---|---|---|
| AD-58099.1 | 3.131 | 1.141 |
| AD-58111.1 | 12.750 | 5.280 |
| AD-58123.1 | 0.679 | 7.587 |
| AD-58088.1 | 0.218 | 3.487 |
| AD-58113.1 | 7.296 | 3.540 |
| AD-58119.1 | 33.240 | 14.740 |
| AD-58096.1 | 10.380 | 4.199 |
| AD-58108.1 | 0.953 | 10.080 |
| AD-58120.1 | 36.170 | 88.070 |

TABLE 12
IC₅₀ data in primary mouse hepatocytes
with GalNAC conjugated iRNAs

| Duplex ID | IC₅₀ (nM) | STDEV |
|---|---|---|
| AD-58099 | 3.777 | 0.122 |
| AD-58111 | 0.622 | 2.421 |
| AD-58123 | 0.549 | 1.626 |
| AD-58088 | 9.513 | 2.588 |
| AD-58121 | 2.169 | 1.176 |
| AD-58133 | 3.802 | 1.006 |
| AD-58116 | 2.227 | 0.604 |
| AD-58644.1 | 4.596 | 0.3506 |
| AD-58651.1 | 59.76 | 51.99 |
| AD-58641.1 | 0.82 | 0.2618 |
| AD-58648.1 | 7.031 | 1.256 |
| AD-58642.1 | 0.5414 | 0.7334 |
| AD-58649.1 | 3.32 | 4.922 |
| AD-58647.1 | 1.356 | 0.5215 |
| AD-58654.1 | 2.09 | 0.8338 |
| AD-58645.1 | 2.944 | 0.3315 |
| AD-58652.1 | 5.316 | 2.477 |
| AD-58643.1 | 2.179 | 1.112 |
| AD-58650.1 | 8.223 | 3.76 |
| AD-58646.1 | 2.581 | 0.8186 |
| AD-58653.1 | 2.451 | 1.249 |

TABLE 13
C5 single dose screen in Hep3B cells
with modified and unmodified iRNAs

| | 1 nM | 0.01 nM | 1 nM | 0.01 nM |
|---|---|---|---|---|
| Duplex | AVG | AVG | STDEV | STDEV |
| AD-58143.1 | 12.13 | 100.58 | 3.47 | 3.94 |
| AD-58149.1 | 10.46 | 64.97 | 0.98 | 0.00 |
| AD-58155.1 | 44.88 | 76.24 | 1.56 | 3.74 |
| AD-58161.1 | 8.51 | 102.30 | 1.06 | 0.50 |
| AD-58167.1 | 6.54 | 76.24 | 1.15 | 3.74 |
| AD-58173.1 | 6.85 | 107.44 | 0.85 | 4.74 |
| AD-58179.1 | 10.19 | 78.07 | 0.59 | 1.15 |
| AD-58185.1 | 29.46 | 79.99 | 3.64 | 0.78 |
| AD-58144.1 | 16.82 | 81.95 | 1.09 | 0.40 |
| AD-58150.1 | 11.05 | 76.20 | 2.55 | 0.00 |
| AD-58156.1 | 25.92 | 76.73 | 2.72 | 1.50 |
| AD-58162.1 | 13.25 | 71.89 | 0.43 | 3.87 |
| AD-58168.1 | 9.74 | 45.16 | 0.52 | 1.11 |
| AD-58174.1 | 4.84 | 70.14 | 0.25 | 2.75 |
| AD-58180.1 | 9.41 | 56.77 | 1.91 | 1.95 |
| AD-58186.1 | 9.97 | 68.91 | 1.03 | 0.34 |
| AD-58145.1 | 14.29 | 103.38 | 1.94 | 2.03 |
| AD-58151.1 | 10.16 | 81.17 | 1.71 | 4.77 |
| AD-58157.1 | 4.72 | 63.19 | 1.05 | 0.00 |
| AD-58163.1 | 4.95 | 40.13 | 1.65 | 0.59 |
| AD-58169.1 | 17.02 | 83.10 | 1.88 | 2.04 |
| AD-58175.1 | 8.30 | 62.54 | 0.28 | 0.31 |
| AD-58181.1 | 21.89 | 55.26 | 4.22 | 3.52 |
| AD-58187.1 | 61.96 | 71.12 | 2.61 | 2.79 |
| AD-58146.1 | 14.25 | 95.23 | 2.64 | 6.53 |
| AD-58152.1 | 11.22 | 70.09 | 0.80 | 7.88 |
| AD-58158.1 | 7.96 | 98.86 | 0.76 | 4.36 |
| AD-58164.1 | 11.60 | 43.83 | 2.06 | 3.43 |
| AD-58170.1 | 12.28 | 39.59 | 0.96 | 1.36 |
| AD-58176.1 | 6.89 | 38.77 | 1.04 | 1.33 |
| AD-58182.1 | 18.65 | 55.78 | 0.96 | 0.55 |
| AD-58188.1 | 5.40 | 69.39 | 1.07 | 0.34 |
| AD-58147.1 | 8.22 | 106.66 | 0.77 | 2.61 |
| AD-58153.1 | 68.10 | 104.17 | 4.44 | 18.29 |
| AD-58159.1 | 8.76 | 81.41 | 1.54 | 2.79 |
| AD-58190.1 | 21.94 | 77.26 | 2.23 | 0.76 |
| AD-58196.1 | 15.97 | 72.43 | 1.07 | 5.32 |
| AD-58202.1 | 11.99 | 93.83 | 5.34 | 2.76 |
| AD-58208.1 | 18.63 | 52.07 | 12.88 | 2.55 |
| AD-58214.1 | 6.85 | 94.15 | 0.51 | 2.31 |
| AD-58220.1 | 11.50 | 78.34 | 3.85 | 0.77 |
| AD-58226.1 | 5.77 | 57.75 | 1.71 | 1.13 |
| AD-58231.1 | 7.23 | 75.67 | 1.07 | 0.74 |
| AD-58191.1 | 35.40 | 66.17 | 5.50 | 4.21 |
| AD-58197.1 | 12.05 | 67.49 | 1.70 | 0.33 |
| AD-58203.1 | 15.16 | 66.80 | 1.46 | 1.31 |
| AD-58209.1 | 7.58 | 71.23 | 3.58 | 6.28 |
| AD-58233.1 | 27.01 | 86.02 | 0.86 | 0.42 |
| AD-58193.1 | 15.37 | 99.85 | 1.44 | 0.00 |
| AD-58199.1 | 21.52 | 78.39 | 6.02 | 16.40 |
| AD-58205.1 | 24.13 | 78.88 | 5.46 | 0.77 |
| AD-58211.1 | 16.38 | 32.37 | 2.61 | 0.48 |
| AD-58217.1 | 12.23 | 70.16 | 0.29 | 3.44 |
| AD-58223.1 | 8.51 | 72.85 | 3.01 | 1.79 |
| AD-58229.1 | 5.50 | 75.93 | 1.96 | 0.37 |
| AD-58234.1 | 46.86 | 101.94 | 15.59 | 0.00 |
| AD-58194.1 | 14.49 | 107.05 | 2.47 | 4.20 |
| AD-58200.1 | 16.21 | 61.04 | 0.96 | 1.20 |
| AD-58206.1 | 13.25 | 37.73 | 2.82 | 2.03 |
| AD-58236.1 | 8.29 | 119.17 | 1.16 | 2.92 |
| AD-58242.1 | 12.05 | 102.69 | 0.44 | 4.03 |
| AD-58248.1 | 62.78 | 83.41 | 15.22 | 3.27 |
| AD-58254.1 | 11.18 | 100.54 | 1.59 | 0.00 |
| AD-58260.1 | 8.42 | 71.84 | 1.10 | 0.35 |
| AD-58266.1 | 14.05 | 92.21 | 1.91 | 2.26 |
| AD-58272.1 | 22.63 | 81.11 | 1.62 | 1.59 |
| AD-58277.1 | 70.51 | 75.67 | 4.80 | 0.74 |
| AD-58237.1 | 28.10 | 98.56 | 1.96 | 5.79 |
| AD-58243.1 | 14.16 | 86.05 | 1.11 | 2.95 |
| AD-58249.1 | 77.08 | 96.45 | 15.14 | 0.95 |
| AD-58255.1 | 12.27 | 47.89 | 2.58 | 0.00 |
| AD-58279.1 | 25.78 | 94.13 | 5.52 | 0.46 |
| AD-58239.1 | 22.98 | 83.45 | 0.28 | 4.91 |
| AD-58245.1 | 89.60 | 90.93 | 15.24 | 0.45 |
| AD-58251.1 | 28.39 | 86.32 | 7.29 | 0.00 |
| AD-58257.1 | 48.97 | 64.53 | 9.10 | 1.90 |
| AD-58263.1 | 9.14 | 83.39 | 1.27 | 1.63 |
| AD-58269.1 | 83.84 | 75.94 | 15.90 | 1.12 |
| AD-58275.1 | 10.29 | 86.32 | 0.73 | 0.85 |
| AD-58280.1 | 72.77 | 110.04 | 7.44 | 3.24 |
| AD-58240.1 | 65.42 | 75.69 | 3.82 | 2.23 |
| AD-58246.1 | 59.19 | 65.88 | 28.95 | 0.65 |
| AD-58252.1 | 15.35 | 97.26 | 1.14 | 7.62 |
| Mock | 76.53 | 66.57 | 14.26 | 4.72 |
| AD-1955 | 72.30 | 82.72 | 19.54 | 49.99 |
| Untreated | 100.00 | 100.00 | 21.68 | 26.78 |

TABLE 14
C5 single dose screen in primary mouse hepatocytes
with modified and unmodified iRNAs

| | 1 nM | 0.1 nM | 1 nM | 0.1 nM |
|---|---|---|---|---|
| Duplex ID | AVG | AVG | STDEV | STDEV |
| AD-58143.1 | 4.51 | 81.77 | 3.13 | 8.75 |
| AD-58149.1 | 4.65 | 73.16 | 3.14 | 20.17 |
| AD-58155.1 | 65.56 | 79.74 | 4.66 | 9.36 |
| AD-58161.1 | 16.82 | 81.11 | 6.22 | 7.43 |
| AD-58167.1 | 4.72 | 77.12 | 1.17 | 14.25 |
| AD-58173.1 | 5.57 | 76.00 | 3.14 | 13.52 |
| AD-58179.1 | 14.55 | 77.88 | 1.44 | 18.40 |
| AD-58185.1 | 15.69 | 72.59 | 8.67 | 7.81 |
| AD-58144.1 | 8.70 | 91.49 | 0.90 | 7.08 |
| AD-58150.1 | 12.51 | 84.01 | 1.64 | 8.20 |
| AD-58156.1 | 18.23 | 97.32 | 1.47 | 19.50 |
| AD-58162.1 | 7.72 | 78.89 | 5.19 | 13.80 |
| AD-58190.1 | 11.86 | 92.80 | 2.82 | 4.41 |
| AD-58196.1 | 7.27 | 82.71 | 1.39 | 31.81 |
| AD-58202.1 | 10.67 | 87.11 | 1.04 | 35.79 |
| AD-58208.1 | 32.21 | 74.39 | 8.60 | 27.45 |
| AD-58214.1 | 4.24 | 67.63 | 0.45 | 17.85 |
| AD-58220.1 | 13.64 | 96.14 | 4.56 | 14.36 |
| AD-58226.1 | 3.83 | 63.44 | 1.30 | 11.94 |
| AD-58231.1 | 5.95 | 82.24 | 2.80 | 17.36 |
| AD-58191.1 | 14.50 | 99.50 | 5.48 | 5.53 |
| AD-58197.1 | 16.12 | 93.09 | 0.81 | 3.21 |
| AD-58203.1 | 12.52 | 104.63 | 5.98 | 6.02 |
| AD-58209.1 | 8.79 | 59.35 | 3.05 | 13.07 |
| AD-58233.1 | 9.50 | 64.26 | 5.69 | 8.70 |
| AD-58193.1 | 8.88 | 89.60 | 3.36 | 3.08 |
| AD-58199.1 | 13.56 | 87.14 | 2.18 | 6.44 |
| AD-58205.1 | 46.84 | 89.13 | 4.48 | 17.16 |
| AD-58211.1 | 13.10 | 111.62 | 1.10 | 21.54 |
| AD-58217.1 | 29.79 | 117.49 | 11.85 | 20.41 |
| AD-58223.1 | 20.53 | 105.44 | 1.94 | 2.98 |
| AD-58229.1 | 13.76 | 98.15 | 1.05 | 9.03 |
| AD-58234.1 | 12.33 | 71.34 | 0.72 | 4.17 |
| AD-58194.1 | 14.02 | 90.60 | 1.39 | 15.64 |
| AD-58200.1 | 5.25 | 90.95 | 1.37 | 31.70 |
| AD-58206.1 | 8.19 | 109.47 | 3.99 | 21.75 |
| AD-58236.1 | 2.07 | 70.19 | 0.80 | 20.59 |
| AD-58242.1 | 4.76 | 53.26 | 1.59 | 11.56 |
| AD-58248.1 | 62.42 | 78.23 | 5.47 | 25.85 |
| AD-58254.1 | 16.47 | 70.22 | 2.92 | 21.74 |
| AD-58260.1 | 2.84 | 75.65 | 0.38 | 11.59 |
| AD-58266.1 | 40.70 | 89.88 | 16.05 | 11.57 |
| AD-58272.1 | 21.42 | 59.44 | 13.29 | 10.98 |
| AD-58277.1 | 71.72 | 121.44 | 16.35 | 21.16 |
| AD-58237.1 | 11.85 | 112.68 | 9.22 | 12.88 |
| AD-58243.1 | 10.46 | 90.64 | 3.42 | 4.33 |
| AD-58249.1 | 71.47 | 113.30 | 4.30 | 3.84 |
| AD-58255.1 | 6.86 | 78.55 | 2.22 | 28.37 |
| AD-58279.1 | 7.15 | 74.96 | 2.84 | 4.72 |
| AD-58239.1 | 13.64 | 106.45 | 1.87 | 8.25 |
| AD-58245.1 | 68.67 | 112.08 | 21.89 | 7.73 |
| AD-58251.1 | 47.01 | 133.20 | 4.69 | 7.14 |
| AD-58257.1 | 30.68 | 87.51 | 2.87 | 32.84 |
| AD-58263.1 | 7.22 | 83.23 | 2.55 | 37.50 |
| AD-58269.1 | 78.90 | 106.06 | 5.07 | 3.04 |
| AD-58275.1 | 8.92 | 95.77 | 1.91 | 7.14 |
| AD-58280.1 | 16.67 | 78.47 | 4.15 | 6.06 |
| AD-58240.1 | 71.03 | 138.54 | 5.32 | 10.87 |
| AD-58246.1 | 71.87 | 89.02 | 4.95 | 8.63 |
| AD-58252.1 | 4.04 | 56.10 | 1.23 | 12.02 |
| Mock | 66.84 | 82.81 | 2.75 | 17.19 |
| AD-1955 | 87.44 | 102.07 | 3.64 | 4.08 |
| Untreated | 100.00 | 100.00 | 15.25 | 18.37 |

TABLE 15
IC₅₀ data in Hep3B cells with modified and unmodified iRNAs

| Duplex ID | IC₅₀ (pM) | STDEV |
|---|---|---|
| AD-58143.1 | 36.35 | 12.26 |
| AD-58149.1 | 5.735 | 6.196 |
| AD-58161.1 | 78.12 | 26.64 |
| AD-58167.1 | 31.03 | 18.14 |
| AD-58173.1 | 29.12 | 16.53 |
| AD-58236.1 | 52.73 | 32.02 |
| AD-58242.1 | 8.859 | 4.321 |
| AD-58260.1 | 7.706 | 5.094 |
| AD-58263.1 | 96.64 | 47.61 |

TABLE 16
IC₅₀ data in primary mouse hepatocytes
with modified and unmodified iRNAs

| Duplex ID | IC₅₀ (pM) | STDEV |
|---|---|---|
| AD-58260.1 | 1.015 | 0.9676 |
| AD-58149.1 | 1.309 | 1.749 |
| AD-58167.1 | 1.991 | 2.477 |
| AD-58242.1 | 0.5866 | 1.8 |
| AD-58236.1 | 0.4517 | 0.06392 |
| AD-58143.1 | 0.8876 | 0.1613 |
| AD-58279.1 | 3.116 | 0.7368 |
| AD-58252.1 | 7.153 | 1.021 |
| AD-58173.1 | 7.144 | 19.88 |
| AD-58263.1 | 3.224 | 5.478 |

### Example 3. In Vivo Screening

[0697] A subset of seven GalNAC conjugated iRNAs was selected for further in vivo evaluation.

[0698] C57BL/6 mice (N=3 per group) were injected subcutaneously with 10 mg/kg of GalNAc conjugated duplexes or an equal volume of 1× Dulbecco's Phosphate-Buffered Saline (DPBS) (Life Technologies, Cat#14040133). Forty-eight hours later, mice were euthanized and the livers were dissected and flash frozen in liquid nitrogen. Livers were ground in a 2000 Geno/Grinder (SPEX SamplePrep, Metuchen, N.J.). Approximately 10 mg of liver powder per sample was used for RNA isolation. Samples were first homogenized in a TissueLyserII (Qiagen Inc, Valencia, Calif.) and then RNA was extracted using a RNeasy 96 Universal Tissue Kit (Qiagen Inc, Cat#74881) following manufacturer's protocol using vacuum/spin technology. RNA concentration was measured by a NanoDrop 8000 (Thermo Scientific, Wilmington, Del.) and was adjusted to 100 ng/μl. cDNA and RT-PCR were performed as described above.

[0699] The results of the single dose screen are depicted in FIG. 2. Table 17 shows the results of an in vivo single dose screen with the indicated GalNAC conjugated modified iRNAs. Data are expressed as percent of mRNA remaining relative to DPBS treated mice. The “Experiments” column lists the number of experiments from which the average was calculated. The standard deviation is calculated from all mice in a group across all experiments analyzed.

TABLE 17
In vivo C5 single dose screen

| Duplex ID | Experiments | AVG | STDEV |
|---|---|---|---|
| AD-58088.2 | 2 | 82.66 | 13.54 |
| AD-58644.1 | 1 | 37.79 | 9.63 |
| AD-58651.1 | 1 | 75.33 | 5.21 |
| AD-58099.2 | 2 | 71.94 | 15.45 |
| AD-58641.1 | 1 | 20.09 | 4.09 |
| AD-58648.1 | 1 | 48.43 | 9.07 |
| AD-58111.2 | 3 | 67.17 | 13.60 |
| AD-58642.1 | 2 | 21.78 | 5.32 |
| AD-58649.1 | 1 | 45.30 | 14.02 |
| AD-58116.2 | 2 | 70.16 | 10.32 |
| AD-58647.1 | 1 | 26.77 | 4.14 |
| AD-58654.1 | 1 | 50.06 | 27.85 |
| AD-58121.2 | 2 | 52.56 | 13.00 |
| AD-58645.1 | 1 | 24.60 | 1.29 |
| AD-58652.1 | 1 | 52.67 | 3.87 |
| AD-58123.2 | 2 | 65.70 | 9.60 |
| AD-58643.1 | 1 | 23.21 | 2.41 |
| AD-58650.1 | 1 | 46.75 | 14.10 |
| AD-58133.2 | 3 | 51.98 | 13.45 |
| AD-58646.1 | 2 | 28.67 | 5.34 |
| AD-58653.1 | 1 | 43.02 | 10.61 |
| PBS | 3 | 100.00 | 9.03 |

[0700] Two of the most efficacious GalNAC conjugated iRNAs were further modified to include additional phosphorothioate linkages (Table 18) and the efficacy of these duplexes was determined in vivo as described above. The results of the single dose screen are depicted in FIG. 3 and demonstrate that the iRNA agents with additional phosphorothiate linkages are more efficacious than those iRNA agents without or with fewer phosphorothioate linkages.

TABLE 18
Phosphorothioate Modifed GalNAC Conjugated C5 iRNAs

| | | | SEQ | | | SEQ | |
|---|---|---|---|---|---|---|---|
| | Sense | | ID | | | ID | |
| Duplex ID | strand | Sense sequence | NO: | Antisense | Antisense sequence | NO: | Cross Reactivity |
| AD-58642.1 | A-119324.1 | GfsasCfaAfaAfuAfAfCfu | 551 | A-119325.1 | asUfsuAfuAfgUfgAfguuAfu | 555 | HumRheMusRat |
| | | CfaCfuAfuAfaUfL96 | | | UfuUfgUfcsasa | | |
| AD-58111.2 | A-118316.1 | GfaCfaAfaAfuAfAfCfu | 552 | A-118317.1 | aUfuAfuAfgUfgAfguuAfuUfu | 556 | HumRheMusRat |
| | | CfaCfuAfuAfaUfL96 | | | UfgUfcsAfsa | | |
| AD-58646.1 | A-119332.1 | CfsasGfaUfcAfaAfCfAfc | 553 | A-119333.1 | asCfsuGfaAfaUfuGfuguUfu | 557 | MusRat |
| | | AfaUfuUfcAfgUfL96 | | | GfaUfcUfgscsa | | |
| AD-58133.2 | A-118386.1 | CfaGfaUfcAfaAfCfAfcA | 554 | A-118387.1 | aCfuGfaAfaUfuGfuguUfu | 558 | MusRat |
| | | faUfuUfcAfgUfL96 | | | GfaUfcUfgsCfsa | | |

[0701] Given the impact of the additional phosphorothioate linkages on the silencing ability of the iRNA agents described above, the efficacy of additional GalNAC conjugated iRNA duplexes including phosphoriothioate linkages (Table 19) was determined in vivo as described above. The results of this single dose screen are depicted in FIG. 4.

[0702] The duration of silencing of AD-58642 in vivo was determined by administering a single 2.5 mg/kg, 10 mg/kg, or 25 mg/kg dose to rats and determining the amount of C5 protein (FIG. 5B) present on day 7 and the activity of C5 protein (FIG. 5A) present on days 4 and 7. As demonstrated in FIG. 5, there is a 50% reduction in the activity of C5 protein by Day 4 at a 25 mg/kg dose and at Day 7, a greater than 70% reduction in the activity of C5 protein.

[0703] The amount of C5 protein was determined by Western blot analysis of whole serum. The activity of C5 protein was determined by a hemolysis assay. Briefly, a fixed dilution of human C5 depleted human serum was mixed with mouse serum and incubated with antibody-coated sheep red blood cells for 1 hour. The hemoglobin absorbance was measured and the % hemolysis as compared to a reference curve (prepared using a dilution series of mouse serum) was calculated.

[0704] The efficacy of AD-58642 in vivo was also assayed in mice following a single subcutaneous injection of 1.25 mg/kg, 2.5 mg/kg, 5 mg/kg, 10 mg/kg, and 25 mg/kg of AD-58642. At day 5 C5 mRNA was assayed in liver samples using qPCR, C5 activity was assayed for hemolysis, and the amount of C5 protein was determined by Western blot analysis of whole serum.

[0705] As depicted in FIGS. 6A and 6B, although there is only a minor improvement (i.e., about 5%) in efficacy of AD-58642 to inhibit C5 mRNA at a dose of 25 mg/kg as compared to a 10 mg/kg dose, there is an average of 85% silencing with a 25 mg/kg dose. In addition, there is a dose response effect with an IC₅₀ of about 2.5 mg/kg.

[0706] FIGS. 7A and 7B and 8 demonstrate that AD-58642 is efficacious for decreasing the amount of C5 protein (FIG. 8) and C5 protein activity (FIGS. 7A and 7B).

[0707] The duration of silencing of AD-58641 in vivo was also determined by subcutaneously administering a single 0.625 mg/kg, 1.25 mg/kg, 2.5 mg/kg, 5.0 mg/kg, or 10 mg/kg dose of AD-58641 to C57Bl/6 (n=3) mice and determining the amount of C5 protein present in these animals on days 5 and 9 by ELISA. Briefly, serum was collected on day 0, pre-bleed, day 5, and day 9 and the levels of C5 proteins were quantified by ELISA. C5 protein levels were normalized to the day 0 pre-bleed level. As depicted in FIG. 9, the results demonstrate that there is a dose dependent potent and durable knock-down of C5 serum protein. (The single dose ED₅₀ was 0.6 mg/kg).

[0708] Compound AD-58641 was also tested for efficacy in C57Bl/6 mice using a multi-dosing administration protocol. Mice were subcutaneously administered compound AD-58641 at a 0.625 mg/kg, 1.25 mg/kg, or 2.5 mg/kg dose at days 0, 1, 2, and 3. Serum was collected at days 0 and 8 as illustrated in FIG. 10 and analyzed for C5 protein levels by ELISA. C5 levels were normalized to the day 0 pre-bleed level. FIG. 10 shows that multi-dosing of AD-58641 achieves silencing of C5 protein at all of the does tested, with a greater than 90% silencing of C5 protein at a dose of 2.5 mg/kg.

[0709] Compound AD-58641 was further tested for efficacy and to evaluate the cumulative effect of the compound in rats using a repeat administration protocol. Wild-type Sprague Dawley rats were subcutaneously injected with compound AD-58641 at a 2.5 mg/kg/dose or 5.0 mg/kg/dose twice a week for 3 weeks (q2w×3). Serum was collected on days 0, 4, 7, 11, 14, 18, 25, and 32. Serum hemolytic activity was quantified using a hemolysis assay in which a 1:150 dilution of rat serum was incubated with sensitized sheep rat blood cells in GVB++ buffer for 1 hour and hemoglobin release was quantified by measuring absorbance at 415 nm (see FIG. 11A). The amount of C5 protein present in the samples was also determined by ELISA (FIG. 11B). The results demonstrate a dose dependent potent and durable decrease in hemolytic activity, achieving about 90% hemolytic activity inhibition.

TABLE 19
Additional Phosphorothioate Modifed GalNAC Conjugated C5 iRNAs

| | | | SEQ |
|---|---|---|---|
| | | | ID |
| Duplex ID | Sense strand | Sense sequence | NO: |
| AD-58088.2 | A-118324.1 | AfuUfuAfaAfcAfAfCfaAfgUfaCfcUfuUfL96 | 559 |
| AD-58644.1 | A-119328.1 | AfsusUfuAfaAfcAfAfCfaAfgUfaCfcUfuUfL96 | 560 |
| AD-58651.1 | A-119328.2 | AfsusUfuAfaAfcAfAfCfaAfgUfaCfcUfuUfL96 | 561 |
| AD-58099.2 | A-118312.1 | UfgAfcAfaAfaUfAfAfcUfcAfcUfaUfaAfL96 | 562 |
| AD-58641.1 | A-119322.1 | UfsgsAfcAfaAfaUfAfAfcUfcAfcUfaUfaAfL96 | 563 |
| AD-58648.1 | A-119322.2 | UfsgsAfcAfaAfaUfAfAfcUfcAfcUfaUfaAfL96 | 564 |
| AD-58111.2 | A-118316.1 | GfaCfaAfaAfuAfAfCfuCfaCfuAfuAfaUfL96 | 565 |
| AD-58642.1 | A-119324.1 | GfsasCfaAfaAfuAfAfCfuCfaCfuAfuAfaUfL96 | 566 |
| AD-58649.1 | A-119324.2 | GfsasCfaAfaAfuAfAfCfuCfaCfuAfuAfaUfL96 | 567 |
| AD-58116.2 | A-118396.1 | GfuUfcCfgGfaUfAfUfuUfgAfaCfuUfuUfL96 | 568 |
| AD-58647.1 | A-119334.1 | GfsusUfcCfgGfaUfAfUfuUfgAfaCfuUfuUfL96 | 569 |
| AD-58654.1 | A-119334.2 | GfsusUfcCfgGfaUfAfUfuUfgAfaCfuUfuUfL96 | 570 |
| AD-58121.2 | A-118382.1 | UfgCfaGfaUfcAfAfAfcAfcAfaUfuUfcAfL96 | 571 |
| AD-58645.1 | A-119330.1 | UfsgsCfaGfaUfcAfAfAfcAfcAfaUfuUfcAfL96 | 572 |
| AD-58652.1 | A-119330.2 | UfsgsCfaGfaUfcAfAfAfcAfcAfaUfuUfcAfL96 | 573 |
| AD-58123.2 | A-118320.1 | AfaGfcAfaGfaUfAfUfuUfuUfaUfaAfuAfL96 | 574 |
| AD-58643.1 | A-119326.1 | AfsasGfcAfaGfaUfAfUfuUfuUfaUfaAfuAfL96 | 575 |
| AD-58650.1 | A-119326.2 | AfsasGfcAfaGfaUfAfUfuUfuUfaUfaAfuAfL96 | 576 |
| AD-58133.2 | A-118386.1 | CfaGfaUfcAfaAfCfAfcAfaUfuUfcAfgUfL96 | 577 |
| AD-58646.1 | A-119332.1 | CfsasGfaUfcAfaAfCfAfcAfaUfuUfcAfgUfL96 | 578 |
| AD-58653.1 | A-119332.2 | CfsasGfaUfcAfaAfCfAfcAfaUfuUfcAfgUfL96 | 579 |

| | | | SEQ |
|---|---|---|---|
| | | | ID |
| Duplex ID | Antisense | Antisense sequence | NO: |
| AD-58088.2 | A-118325.1 | aAfaGfgUfaCfuUfguuGfuUfuAfaAfusCfsu | 580 |
| AD-58644.1 | A-119329.1 | asAfsaGfgUfaCfuUfguuGfuUfuAfaAfuscsu | 581 |
| AD-58651.1 | A-119339.1 | asAfsaGfsgUfsaCfsuUfsguuGfsuUfsuAfsa | 582 |
| | | Afsuscsu | |
| AD-58099.2 | A-118313.1 | uUfaUfaGfuGfaGfuuaUfuUfuGfuCfasAfsu | 583 |
| AD-58641.1 | A-119323.1 | usUfsaUfaGfuGfaGfuuaUfuUfuGfuCfasasu | 584 |
| AD-58648.1 | A-119336.1 | usUfsaUfsaGfsuGfsaGfsuuaUfsuUfsuGfsu | 585 |
| | | Cfsasasu | |
| AD-58111.2 | A-118317.1 | aUfuAfuAfgUfgAfguuAfuUfuUfgUfcsAfsa | 586 |
| AD-58642.1 | A-119325.1 | asUfsuAfuAfgUfgAfguuAfuUfuUfgUfcsasa | 587 |
| AD-58649.1 | A-119337.1 | asUfsuAfsuAfsgUfsgAfsguuAfsuUfsuUfsg | 588 |
| | | Ufscsasa | |
| AD-58116.2 | A-118397.1 | aAfaAfgUfuCfaAfauaUfcCfgGfaAfcsCfsg | 589 |
| AD-58647.1 | A-119335.1 | asAfsaAfgUfuCfaAfauaUfcCfgGfaAfcscsg | 590 |
| AD-58654.1 | A-119342.1 | asAfsaAfsgUfsuCfsaAfsauaUfscCfsgGfsa | 591 |
| | | Afscscsg | |
| AD-58121.2 | A-118383.1 | uGfaAfaUfuGfuGfuuuGfaUfcUfgCfasGfsa | 592 |
| AD-58645.1 | A-119331.1 | usGfsaAfaUfuGfuGfuuuGfaUfcUfgCfasgsa | 593 |
| AD-58652.1 | A-119340.1 | usGfsaAfsaUfsuGfsuGfsuuuGfsaUfscUfsg | 594 |
| | | Cfsasgsa | |
| AD-58123.2 | A-118321.1 | uAfuUfaUfaAfaAfauaUfcUfuGfcUfusUfsu | 595 |
| AD-58643.1 | A-119327.1 | usAfsuUfaUfaAfaAfauaUfcUfuGfcUfususu | 596 |
| AD-58650.1 | A-119338.1 | usAfsuUfsaUfsaAfsaAfsauaUfscUfsuGfsc | 597 |
| | | Ufsususu | |
| AD-58133.2 | A-118387.1 | aCfuGfaAfaUfuGfuguUfuGfaUfcUfgsCfsa | 598 |
| AD-58646.1 | A-119333.1 | asCfsuGfaAfaUfuGfuguUfuGfaUfcUfgscsa | 599 |
| AD-58653.1 | A-119341.1 | asCfsuGfsaAfsaUfsuGfsuguUfsuGfsaUfsc | 600 |
| | | Ufsgscsa | |

| | Start | | |
|---|---|---|---|
| Duplex ID | position | Cross Reactivity | PS# |
| AD-58088.2 | 984 | HumRheMus | 2 |
| AD-58644.1 | 984 | HumRheMus | 6 |
| AD-58651.1 | 984 | HumRheMus | 14 |
| AD-58099.2 | 1513 | HumRheMusRat | 2 |
| AD-58641.1 | 1513 | HumRheMusRat | 6 |
| AD-58648.1 | 1513 | HumRheMusRat | 14 |
| AD-58111.2 | 1514 | HumRheMusRat | 2 |
| AD-58642.1 | 1514 | HumRheMusRat | 6 |
| AD-58649.1 | 1514 | HumRheMusRat | 14 |
| AD-58116.2 | 4502 | MusRat | 2 |
| AD-58647.1 | 4502 | MusRat | 6 |
| AD-58654.1 | 4502 | MusRat | 14 |
| AD-58121.2 | 4945 | MusRat | 2 |
| AD-58645.1 | 4945 | MusRat | 6 |
| AD-58652.1 | 4945 | MusRat | 14 |
| AD-58123.2 | 786 | HumRheMus | 2 |
| AD-58643.1 | 786 | HumRheMus | 6 |
| AD-58650.1 | 786 | HumRheMus | 14 |
| AD-58133.2 | 4947 | MusRat | 2 |
| AD-58646.1 | 4947 | MusRat | 6 |
| AD-58653.1 | 4947 | MusRat | 14 |

### Example 4: Design, Synthesis, and In Vitro Screening of Additional siRNAs

[0710] siRNA Design

[0711] C5 duplexes, 19 nucleotides long for both the sense and antisense strand, were designed using the human C5 mRNA sequence set forth in GenBank Accession No. NM_001735.2. Five-hundred and sixty-nine duplexes were initially identified that did not contain repeats longer than 7 nucleotides, spanning substantially the entire 5480 nucleotide transcript. All 569 duplexes are then scored for predicted efficacy according to a linear model that evaluates the nucleotide pair at each duplex position, and the dose and cell line to be used for screening. The duplexes are also matched against all transcripts in the human RefSeq collection using a custom brute force algorithm, and scored for lowest numbers of mismatches (per strand) to transcripts other than C5. Duplexes to be synthesized and screened are then selected from the 569, according to the following scheme: Beginning at the 5′ end of the transcript, a duplex is selected within a “window” of every 10±2 nucleotides that

[0712] 1) had the highest predicted efficacy,

[0713] 2) had at least one mismatch in both strands to all transcripts other than SERPINC1,

[0714] 3) had not already been synthesized and screened as part of other duplex sets.

[0715] If no duplex is identified within a given window that satisfied all criteria, that window was skipped.

[0716] A detailed list of the 569 C5 sense and antisense strand sequences is shown in Table 20.

[0717] The in vitro efficacy of duplexes comprising the sense and antisense sequences listed in Table 20 is determined using the following methods.

### Cell Culture and Transfections

[0718] HepG2 cells (ATCC, Manassas, Va.) are grown to near confluence at 37° C. in an atmosphere of 5% CO2 in Eagle's Minimum Essential Medium (ATCC) supplemented with 10% FBS, streptomycin, and glutamine (ATCC) before being released from the plate by trypsinization. Transfection is carried out by adding 14.8 μl of Opti-MEM plus 0.2 μl of Lipofectamine RNAiMax per well (Invitrogen, Carlsbad Calif. cat #13778-150) to 5 μl of each of the 164 siRNA duplexes to an individual well in a 96-well plate. The mixture is then incubated at room temperature for 15 minutes. 80 μl of complete growth media without antibiotic containing ˜2.5×10⁴ HepG2 cells is then added to the siRNA mixture. Cells are incubated for 24 hours prior to RNA purification. Experiments are performed at 20 nM and included naïve cells and cells transfected with AD-1955, a luciferase targeting siRNA as negative controls.

Total RNA Isolation Using DYNABEADS mRNA Isolation Kit (Invitrogen, Part #: 610-12)

[0719] Cells are harvested and lysed in 150 μl of Lysis/Binding Buffer then mixed for 5 minute at 700 rpm on a platform shaker (the mixing speed was the same throughout the process). Ten microliters of magnetic beads and 80 μl Lysis/Binding Buffer mixture are added to a round bottom plate and mixed for 1 minute. Magnetic beads are captured using magnetic stand and the supernatant is removed without disturbing the beads. After removing supernatant, the lysed cells are added to the remaining beads and mixed for 5 minutes. After removing supernatant, magnetic beads are washed 2 times with 150 μl Wash Buffer A and mixed for 1 minute. Beads are captured again and supernatant removed. Beads are then washed with 150 μl Wash Buffer B, captured and supernatant is removed. Beads are next washed with 150 μl Elution Buffer, captured and supernatant removed. Beads are allowed to dry for 2 minutes. After drying, 50 μl of Elution Buffer is added and mixed for 5 minutes at 70° C. Beads are captured on magnet for 5 minutes. Forty μl of supernatant, containing the isolated RNA is removed and added to another 96 well plate.

cDNA Synthesis Using ABI High Capacity cDNA Reverse Transcription Kit (Applied Biosystems, Foster City, Calif., Cat #4368813)

[0720] A master mix of 2 μl 10× Buffer, 0.8 μl 25× dNTPs, 2 μl Random primers, 1 μl Reverse Transcriptase, 1 μl RNase inhibitor and 3.2 μl of H₂O per reaction is added into 10 μl total RNA. cDNA is generated using a Bio-Rad C-1000 or S-1000 thermal cycler (Hercules, Calif.) through the following steps: 25° C. 10 min, 37° C. 120 min, 85° C. 5 sec, 4° C. hold.

### Real Time PCR

[0721] Two μl of cDNA is added to a master mix containing 0.5 μl human GAPDH TaqMan Probe (Applied Biosystems Cat #4326317E), 0.5 μl human SERPINC1 TaqMan probe (Applied Biosystems cat # Hs00892758_ml) and 50 Lightcycler 480 probe master mix (Roche Cat #04887301001) per well in a 384-well plate (Roche cat #04887301001). Real time PCR is performed in an LC480 Real Time PCR machine (Roche).

[0722] To calculate relative fold change, real time data is analyzed using the ΔΔCt method and normalized to assays performed with cells transfected with 20 nM AD-1955.

TABLE 20
Additional C5 unmodified sense and antisense strand sequences

| | Position in | | SEQ ID | | SEQ ID |
|---|---|---|---|---|---|
| Oligo Name | NM_001735.2 | Sense Sequence | NO: | Antisense Sequence | NO: |
| NM_001735.2_3-21_s | 3-21 | UAUCCGUGGUUUCCUGCUA | 601 | UAGCAGGAAACCACGGAUA | 1170 |
| NM_001735.2_10-28_s | 10-28 | GGUUUCCUGCUACCUCCAA | 602 | UUGGAGGUAGCAGGAAACC | 1171 |
| NM_001735.2_22-40_s | 22-40 | CCUCCAACCAUGGGCCUUU | 603 | AAAGGCCCAUGGUUGGAGG | 1172 |
| NM_001735.2_33-51_s | 33-51 | GGGCCUUUUGGGAAUACUU | 604 | AAGUAUUCCCAAAAGGCCC | 1173 |
| NM_001735.2_43-61_s | 43-61 | GGAAUACUUUGUUUUUUAA | 605 | UUAAAAAACAAAGUAUUCC | 1174 |
| NM_001735.2_49-67_s | 49-67 | CUUUGUUUUUUAAUCUUCC | 606 | GGAAGAUUAAAAAACAAAG | 1175 |
| NM_001735.2_63-81_s | 63-81 | CUUCCUGGGGAAAACCUGG | 607 | CCAGGUUUUCCCCAGGAAG | 1176 |
| NM_001735.2_71-89_s | 71-89 | GGAAAACCUGGGGACAGGA | 608 | UCCUGUCCCCAGGUUUUCC | 1177 |
| NM_001735.2_81-99_s | 81-99 | GGGACAGGAGCAAACAUAU | 609 | AUAUGUUUGCUCCUGUCCC | 1178 |
| NM_001735.2_91-109_s | 91-109 | CAAACAUAUGUCAUUUCAG | 610 | CUGAAAUGACAUAUGUUUG | 1179 |
| NM_001735.2_102-120_s | 102-120 | CAUUUCAGCACCAAAAAUA | 611 | UAUUUUUGGUGCUGAAAUG | 1180 |
| NM_001735.2_109-127_s | 109-127 | GCACCAAAAAUAUUCCGUG | 612 | CACGGAAUAUUUUUGGUGC | 1181 |
| NM_001735.2_123-141_s | 123-141 | CCGUGUUGGAGCAUCUGAA | 613 | UUCAGAUGCUCCAACACGG | 1182 |
| NM_001735.2_130-148_s | 130-148 | GGAGCAUCUGAAAAUAUUG | 614 | CAAUAUUUUCAGAUGCUCC | 1183 |
| NM_001735.2_139-157_s | 139157 | GAAAAUAUUGUGAUUCAAG | 615 | CUUGAAUCACAAUAUUUUC | 1184 |
| NM_001735.2_150-168_s | 150-168 | GAUUCAAGUUUAUGGAUAC | 616 | GUAUCCAUAAACUUGAAUC | 1185 |
| NM_001735.2_163-181_s | 163-181 | GGAUACACUGAAGCAUUUG | 617 | CAAAUGCUUCAGUGUAUCC | 1186 |
| NM_001735.2_172-190_s | 172-190 | GAAGCAUUUGAUGCAACAA | 618 | UUGUUGCAUCAAAUGCUUC | 1187 |
| NM_001735.2_183-201_s | 183-201 | UGCAACAAUCUCUAUUAAA | 619 | UUUAAUAGAGAUUGUUGCA | 1188 |
| NM_001735.2_189-207_s | 189-207 | AAUCUCUAUUAAAAGUUAU | 620 | AUAACUUUUAAUAGAGAUU | 1189 |
| NM_001735.2_201-219_s | 201-219 | AAGUUAUCCUGAUAAAAAA | 621 | UUUUUUAUCAGGAUAACUU | 1190 |
| NM_001735.2_209-227_s | 209-227 | CUGAUAAAAAAUUUAGUUA | 622 | UAACUAAAUUUUUUAUCAG | 1191 |
| NM_001735.2_221-239_s | 221-239 | UUAGUUACUCCUCAGGCCA | 623 | UGGCCUGAGGAGUAACUAA | 1192 |
| NM_001735.2_230-248_s | 230-248 | CCUCAGGCCAUGUUCAUUU | 624 | AAAUGAACAUGGCCUGAGG | 1193 |
| NM_001735.2_242-260_s | 242-260 | UUCAUUUAUCCUCAGAGAA | 625 | UUCUCUGAGGAUAAAUGAA | 1194 |
| NM_001735.2_252-270_s | 252-270 | CUCAGAGAAUAAAUUCCAA | 626 | UUGGAAUUUAUUCUCUGAG | 1195 |
| NM_001735.2_259-277_s | 259-277 | AAUAAAUUCCAAAACUCUG | 627 | CAGAGUUUUGGAAUUUAUU | 1196 |
| NM_001735.2_273-291_s | 273-291 | CUCUGCAAUCUUAACAAUA | 628 | UAUUGUUAAGAUUGCAGAG | 1197 |
| NM_001735.2_282-300_s | 282-300 | CUUAACAAUACAACCAAAA | 629 | UUUUGGUUGUAUUGUUAAG | 1198 |
| NM_001735.2_292-310_s | 292-310 | CAACCAAAACAAUUGCCUG | 630 | CAGGCAAUUGUUUUGGUUG | 1199 |
| NM_001735.2_301-319_s | 301-319 | CAAUUGCCUGGAGGACAAA | 631 | UUUGUCCUCCAGGCAAUUG | 1200 |
| NM_001735.2_313-331_s | 313-331 | GGACAAAACCCAGUUUCUU | 632 | AAGAAACUGGGUUUUGUCC | 1201 |
| NM_001735.2_322-340_s | 322-340 | CCAGUUUCUUAUGUGUAUU | 633 | AAUACACAUAAGAAACUGG | 1202 |
| NM_001735.2_332-350_s | 332-350 | AUGUGUAUUUGGAAGUUGU | 634 | ACAACUUCCAAAUACACAU | 1203 |
| NM_001735.2_342-360_s | 342-360 | GGAAGUUGUAUCAAAGCAU | 635 | AUGCUUUGAUACAACUUCC | 1204 |
| NM_001735.2_349-367_s | 349-367 | GUAUCAAAGCAUUUUUCAA | 636 | UUGAAAAAUGCUUUGAUAC | 1205 |
| NM_001735.2_361-379_s | 361-379 | UUUUCAAAAUCAAAAAGAA | 637 | UUCUUUUUGAUUUUGAAAA | 1206 |
| NM_001735.2_371-389_s | 371-389 | CAAAAAGAAUGCCAAUAAC | 638 | GUUAUUGGCAUUCUUUUUG | 1207 |
| NM_001735.2_381-399_s | 381-399 | GCCAAUAACCUAUGACAAU | 639 | AUUGUCAUAGGUUAUUGGC | 1208 |
| NM_001735.2_389-407_s | 389-407 | CCUAUGACAAUGGAUUUCU | 640 | AGAAAUCCAUUGUCAUAGG | 1209 |
| NM_001735.2_399-417_s | 399-417 | UGGAUUUCUCUUCAUUCAU | 641 | AUGAAUGAAGAGAAAUCCA | 1210 |
| NM_001735.2_411-429_s | 411-429 | CAUUCAUACAGACAAACCU | 642 | AGGUUUGUCUGUAUGAAUG | 1211 |
| NM_001735.2_419-437_s | 419-437 | CAGACAAACCUGUUUAUAC | 643 | GUAUAAACAGGUUUGUCUG | 1212 |
| NM_001735.2_430-448_s | 430-448 | GUUUAUACUCCAGACCAGU | 644 | ACUGGUCUGGAGUAUAAAC | 1213 |
| NM_001735.2_441-459_s | 441-459 | AGACCAGUCAGUAAAAGUU | 645 | AACUUUUACUGACUGGUCU | 1214 |
| NM_001735.2_450-468_s | 450-468 | AGUAAAAGUUAGAGUUUAU | 646 | AUAAACUCUAACUUUUACU | 1215 |
| NM_001735.2_460-478_s | 460-478 | AGAGUUUAUUCGUUGAAUG | 647 | CAUUCAACGAAUAAACUCU | 1216 |
| NM_001735.2_470-488_s | 470-488 | CGUUGAAUGACGACUUGAA | 648 | UUCAAGUCGUCAUUCAACG | 1217 |
| NM_001735.2_483-501_s | 483-501 | CUUGAAGCCAGCCAAAAGA | 649 | UCUUUUGGCUGGCUUCAAG | 1218 |
| NM_001735.2_490-508_s | 490-508 | CCAGCCAAAAGAGAAACUG | 650 | CAGUUUCUCUUUUGGCUGG | 1219 |
| NM_001735.2_503-521_s | 503-521 | AAACUGUCUUAACUUUCAU | 651 | AUGAAAGUUAAGACAGUUU | 1220 |
| NM_001735.2_513-531_s | 513-531 | AACUUUCAUAGAUCCUGAA | 652 | UUCAGGAUCUAUGAAAGUU | 1221 |
| NM_001735.2_519-537_s | 519-537 | CAUAGAUCCUGAAGGAUCA | 653 | UGAUCCUUCAGGAUCUAUG | 1222 |
| NM_001735.2_529-547_s | 529-547 | GAAGGAUCAGAAGUUGACA | 654 | UGUCAACUUCUGAUCCUUC | 1223 |
| NM_001735.2_543-561_s | 543-561 | UGACAUGGUAGAAGAAAUU | 655 | AAUUUCUUCUACCAUGUCA | 1224 |
| NM_001735.2_553-571_s | 553-571 | GAAGAAAUUGAUCAUAUUG | 656 | CAAUAUGAUCAAUUUCUUC | 1225 |
| NM_001735.2_562-580_s | 562-580 | GAUCAUAUUGGAAUUAUCU | 657 | AGAUAAUUCCAAUAUGAUC | 1226 |
| NM_001735.2_571-589_s | 571-589 | GGAAUUAUCUCUUUUCCUG | 658 | CAGGAAAAGAGAUAAUUCC | 1227 |
| NM_001735.2_579-597_s | 579-597 | CUCUUUUCCUGACUUCAAG | 659 | CUUGAAGUCAGGAAAAGAG | 1228 |
| NM_001735.2_590-608_s | 590-608 | ACUUCAAGAUUCCGUCUAA | 660 | UUAGACGGAAUCUUGAAGU | 1229 |
| NM_001735.2_601-619_s | 601-619 | CCGUCUAAUCCUAGAUAUG | 661 | CAUAUCUAGGAUUAGACGG | 1230 |
| NM_001735.2_610-628_s | 610-628 | CCUAGAUAUGGUAUGUGGA | 662 | UCCACAUACCAUAUCUAGG | 1231 |
| NM_001735.2_623-641_s | 623-641 | UGUGGACGAUCAAGGCUAA | 663 | UUAGCCUUGAUCGUCCACA | 1232 |
| NM_001735.2_629-647_s | 629-647 | CGAUCAAGGCUAAAUAUAA | 664 | UUAUAUUUAGCCUUGAUCG | 1233 |
| NM_001735.2_642-660_s | 642-660 | AUAUAAAGAGGACUUUUCA | 665 | UGAAAAGUCCUCUUUAUAU | 1234 |
| NM_001735.2_649-667_s | 649-667 | GAGGACUUUUCAACAACUG | 666 | CAGUUGUUGAAAAGUCCUC | 1235 |
| NM_001735.2_662-680_s | 662-680 | CAACUGGAACCGCAUAUUU | 667 | AAAUAUGCGGUUCCAGUUG | 1236 |
| NM_001735.2_672-690_s | 672-690 | CGCAUAUUUUGAAGUUAAA | 668 | UUUAACUUCAAAAUAUGCG | 1237 |
| NM_001735.2_683-701_s | 683-701 | AAGUUAAAGAAUAUGUCUU | 669 | AAGACAUAUUCUUUAACUU | 1238 |
| NM_001735.2_691-709_s | 691-709 | GAAUAUGUCUUGCCACAUU | 670 | AAUGUGGCAAGACAUAUUC | 1239 |
| NM_001735.2_703-721_s | 703-721 | CCACAUUUUUCUGUCUCAA | 671 | UUGAGACAGAAAAAUGUGG | 1240 |
| NM_001735.2_713-731_s | 713-731 | CUGUCUCAAUCGAGCCAGA | 672 | UCUGGCUCGAUUGAGACAG | 1241 |
| NM_001735.2_719-737_s | 719-737 | CAAUCGAGCCAGAAUAUAA | 673 | UUAUAUUCUGGCUCGAUUG | 1242 |
| NM_001735.2_730-748_s | 730-748 | GAAUAUAAUUUCAUUGGUU | 674 | AACCAAUGAAAUUAUAUUC | 1243 |
| NM_001735.2_742-760_s | 742-760 | AUUGGUUACAAGAACUUUA | 675 | UAAAGUUCUUGUAACCAAU | 1244 |
| NM_001735.2_752-770_s | 752-770 | AGAACUUUAAGAAUUUUGA | 676 | UCAAAAUUCUUAAAGUUCU | 1245 |
| NM_001735.2_762-780_s | 762-780 | GAAUUUUGAAAUUACUAUA | 677 | UAUAGUAAUUUCAAAAUUC | 1246 |
| NM_001735.2_769-787_s | 769-787 | GAAAUUACUAUAAAAGCAA | 678 | UUGCUUUUAUAGUAAUUUC | 1247 |
| NM_001735.2_781-799_s | 781-799 | AAAGCAAGAUAUUUUUAUA | 679 | UAUAAAAAUAUCUUGCUUU | 1248 |
| NM_001735.2_789-807_s | 789-807 | AUAUUUUUAUAAUAAAGUA | 680 | UACUUUAUUAUAAAAAUAU | 1249 |
| NM_001735.2_803-821_s | 803-821 | AAGUAGUCACUGAGGCUGA | 681 | UCAGCCUCAGUGACUACUU | 1250 |
| NM_001735.2_810-828_s | 810-828 | CACUGAGGCUGACGUUUAU | 682 | AUAAACGUCAGCCUCAGUG | 1251 |
| NM_001735.2_822-840_s | 822-840 | CGUUUAUAUCACAUUUGGA | 683 | UCCAAAUGUGAUAUAAACG | 1252 |
| NM_001735.2_831-849_s | 831-849 | CACAUUUGGAAUAAGAGAA | 684 | UUCUCUUAUUCCAAAUGUG | 1253 |
| NM_001735.2_840-858_s | 840-858 | AAUAAGAGAAGACUUAAAA | 685 | UUUUAAGUCUUCUCUUAUU | 1254 |
| NM_001735.2_852-870_s | 852-870 | CUUAAAAGAUGAUCAAAAA | 686 | UUUUUGAUCAUCUUUUAAG | 1255 |
| NM_001735.2_859-877_s | 859-877 | GAUGAUCAAAAAGAAAUGA | 687 | UCAUUUCUUUUUGAUCAUC | 1256 |
| NM_001735.2_872-890_s | 872-890 | AAAUGAUGCAAACAGCAAU | 688 | AUUGCUGUUUGCAUCAUUU | 1257 |
| NM_001735.2_883-901_s | 883-901 | ACAGCAAUGCAAAACACAA | 689 | UUGUGUUUUGCAUUGCUGU | 1258 |
| NM_001735.2_893-911_s | 893-911 | AAAACACAAUGUUGAUAAA | 690 | UUUAUCAACAUUGUGUUUU | 1259 |
| NM_001735.2_899-917_s | 899-917 | CAAUGUUGAUAAAUGGAAU | 691 | AUUCCAUUUAUCAACAUUG | 1260 |
| NM_001735.2_913-931_s | 913-931 | GGAAUUGCUCAAGUCACAU | 692 | AUGUGACUUGAGCAAUUCC | 1261 |
| NM_001735.2_919-937_s | 919-937 | GCUCAAGUCACAUUUGAUU | 693 | AAUCAAAUGUGACUUGAGC | 1262 |
| NM_001735.2_930-948_s | 930-948 | AUUUGAUUCUGAAACAGCA | 694 | UGCUGUUUCAGAAUCAAAU | 1263 |
| NM_001735.2_939-957_s | 939-957 | UGAAACAGCAGUCAAAGAA | 695 | UUCUUUGACUGCUGUUUCA | 1264 |
| NM_001735.2_951-969_s | 951-969 | CAAAGAACUGUCAUACUAC | 696 | GUAGUAUGACAGUUCUUUG | 1265 |
| NM_001735.2_962-980_s | 962-980 | CAUACUACAGUUUAGAAGA | 697 | UCUUCUAAACUGUAGUAUG | 1266 |
| NM_001735.2_969-987_s | 969-987 | CAGUUUAGAAGAUUUAAAC | 698 | GUUUAAAUCUUCUAAACUG | 1267 |
| NM_001735.2_983-1001_s | 983-1001 | UAAACAACAAGUACCUUUA | 699 | UAAAGGUACUUGUUGUUUA | 1268 |
| NM_001735.2_990-1008_s | 990-1008 | CAAGUACCUUUAUAUUGCU | 700 | AGCAAUAUAAAGGUACUUG | 1269 |
| NM_001735.2_1002-1020_s | 1002-1020 | UAUUGCUGUAACAGUCAUA | 701 | UAUGACUGUUACAGCAAUA | 1270 |
| NM_001735.2_1011-1029_s | 1011-1029 | AACAGUCAUAGAGUCUACA | 702 | UGUAGACUCUAUGACUGUU | 1271 |
| NM_001735.2_1020-1038_s | 1020-1038 | AGAGUCUACAGGUGGAUUU | 703 | AAAUCCACCUGUAGACUCU | 1272 |
| NM_001735.2_1033-1051_s | 1033-1051 | GGAUUUUCUGAAGAGGCAG | 704 | CUGCCUCUUCAGAAAAUCC | 1273 |
| NM_001735.2_1042-1060_s | 1042-1060 | GAAGAGGCAGAAAUACCUG | 705 | CAGGUAUUUCUGCCUCUUC | 1274 |
| NM_001735.2_1050-1068_s | 1050-1068 | AGAAAUACCUGGCAUCAAA | 706 | UUUGAUGCCAGGUAUUUCU | 1275 |
| NM_001735.2_1061-1079_s | 1061-1079 | GCAUCAAAUAUGUCCUCUC | 707 | GAGAGGACAUAUUUGAUGC | 1276 |
| NM_001735.2_1071-1089_s | 1071-1089 | UGUCCUCUCUCCCUACAAA | 708 | UUUGUAGGGAGAGAGGACA | 1277 |
| NM_001735.2_1092-1110_s | 1092-1110 | GAAUUUGGUUGCUACUCCU | 709 | AGGAGUAGCAACCAAAUUC | 1278 |
| NM_001735.2_1102-1120_s | 1102-1120 | GCUACUCCUCUUUUCCUGA | 710 | UCAGGAAAAGAGGAGUAGC | 1279 |
| NM_001735.2_1109-1127_s | 1109-1127 | CUCUUUUCCUGAAGCCUGG | 711 | CCAGGCUUCAGGAAAAGAG | 1280 |
| NM_001735.2_1123-1141_s | 1123-1141 | CCUGGGAUUCCAUAUCCCA | 712 | UGGGAUAUGGAAUCCCAGG | 1281 |
| NM_001735.2_1133-1151_s | 1133-1151 | CAUAUCCCAUCAAGGUGCA | 713 | UGCACCUUGAUGGGAUAUG | 1282 |
| NM_001735.2_1139-1157_s | 1139-1157 | CCAUCAAGGUGCAGGUUAA | 714 | UUAACCUGCACCUUGAUGG | 1283 |
| NM_001735.2_1150-1168_s | 1150-1168 | CAGGUUAAAGAUUCGCUUG | 715 | CAAGCGAAUCUUUAACCUG | 1284 |
| NM_001735.2_1161-1179_s | 1161-1179 | UUCGCUUGACCAGUUGGUA | 716 | UACCAACUGGUCAAGCGAA | 1285 |
| NM_001735.2_1170-1188_s | 1170-1188 | CCAGUUGGUAGGAGGAGUC | 717 | GACUCCUCCUACCAACUGG | 1286 |
| NM_001735.2_1180-1198_s | 1180-1198 | GGAGGAGUCCCAGUAACAC | 718 | GUGUUACUGGGACUCCUCC | 1287 |
| NM_001735.2_1190-1208_s | 1190-1208 | CAGUAACACUGAAUGCACA | 719 | UGUGCAUUCAGUGUUACUG | 1288 |
| NM_001735.2_1200-1218_s | 1200-1218 | GAAUGCACAAACAAUUGAU | 720 | AUCAAUUGUUUGUGCAUUC | 1289 |
| NM_001735.2_1209-1227_s | 1209-1227 | AACAAUUGAUGUAAACCAA | 721 | UUGGUUUACAUCAAUUGUU | 1290 |
| NM_001735.2_1220-1238_s | 1220-1238 | UAAACCAAGAGACAUCUGA | 722 | UCAGAUGUCUCUUGGUUUA | 1291 |
| NM_001735.2_1232-1250_s | 1232-1250 | CAUCUGACUUGGAUCCAAG | 723 | CUUGGAUCCAAGUCAGAUG | 1292 |
| NM_001735.2_1243-1261_s | 1243-1261 | GAUCCAAGCAAAAGUGUAA | 724 | UUACACUUUUGCUUGGAUC | 1293 |
| NM_001735.2_1251-1269_s | 1251-1269 | CAAAAGUGUAACACGUGUU | 725 | AACACGUGUUACACUUUUG | 1294 |
| NM_001735.2_1260-1278_s | 1260-1278 | AACACGUGUUGAUGAUGGA | 726 | UCCAUCAUCAACACGUGUU | 1295 |
| NM_001735.2_1272-1290_s | 1272-1290 | UGAUGGAGUAGCUUCCUUU | 727 | AAAGGAAGCUACUCCAUCA | 1296 |
| NM_001735.2_1279-1297_s | 1279-1297 | GUAGCUUCCUUUGUGCUUA | 728 | UAAGCACAAAGGAAGCUAC | 1297 |
| NM_001735.2_1293-1311_s | 1293-1311 | GCUUAAUCUCCCAUCUGGA | 729 | UCCAGAUGGGAGAUUAAGC | 1298 |
| NM_001735.2_1303-1321_s | 1303-1321 | CCAUCUGGAGUGACGGUGC | 730 | GCACCGUCACUCCAGAUGG | 1299 |
| NM_001735.2_1313-1331_s | 1313-1331 | UGACGGUGCUGGAGUUUAA | 731 | UUAAACUCCAGCACCGUCA | 1300 |
| NM_001735.2_1320-1338_s | 1320-1338 | GCUGGAGUUUAAUGUCAAA | 732 | UUUGACAUUAAACUCCAGC | 1301 |
| NM_001735.2_1332-1350_s | 1332-1350 | UGUCAAAACUGAUGCUCCA | 733 | UGGAGCAUCAGUUUUGACA | 1302 |
| NM_001735.2_1342-1360_s | 1342-1360 | GAUGCUCCAGAUCUUCCAG | 734 | CUGGAAGAUCUGGAGCAUC | 1303 |
| NM_001735.2_1349-1367_s | 1349-1367 | CAGAUCUUCCAGAAGAAAA | 735 | UUUUCUUCUGGAAGAUCUG | 1304 |
| NM_001735.2_1362-1380_s | 1362-1380 | AGAAAAUCAGGCCAGGGAA | 736 | UUCCCUGGCCUGAUUUUCU | 1305 |
| NM_001735.2_1371-1389_s | 1371-1389 | GGCCAGGGAAGGUUACCGA | 737 | UCGGUAACCUUCCCUGGCC | 1306 |
| NM_001735.2_1382-1400_s | 1382-1400 | GUUACCGAGCAAUAGCAUA | 738 | UAUGCUAUUGCUCGGUAAC | 1307 |
| NM_001735.2_1393-1411_s | 1393-1411 | AUAGCAUACUCAUCUCUCA | 739 | UGAGAGAUGAGUAUGCUAU | 1308 |
| NM_001735.2_1399-1417_s | 1399-1471 | UACUCAUCUCUCAGCCAAA | 740 | UUUGGCUGAGAGAUGAGUA | 1309 |
| NM_001735.2_1412-1430_s | 1412-1430 | GCCAAAGUUACCUUUAUAU | 741 | AUAUAAAGGUAACUUUGGC | 1310 |
| NM_001735.2_1422-1440_s | 1422-1440 | CCUUUAUAUUGAUUGGACU | 742 | AGUCCAAUCAAUAUAAAGG | 1311 |
| NM_001735.2_1432-1450_s | 1432-1450 | GAUUGGACUGAUAACCAUA | 743 | UAUGGUUAUCAGUCCAAUC | 1312 |
| NM_001735.2_1439-1457_s | 1439-1457 | CUGAUAACCAUAAGGCUUU | 744 | AAAGCCUUAUGGUUAUCAG | 1313 |
| NM_001735.2_1451-1469_s | 1451-1469 | AGGCUUUGCUAGUGGGAGA | 745 | UCUCCCACUAGCAAAGCCU | 1314 |
| NM_001735.2_1462-1480_s | 1462-1480 | GUGGGAGAACAUCUGAAUA | 746 | UAUUCAGAUGUUCUCCCAC | 1315 |
| NM_001735.2_1471-1489_s | 1471-1489 | CAUCUGAAUAUUAUUGUUA | 747 | UAACAAUAAUAUUCAGAUG | 1316 |
| NM_001735.2_1479-1497_s | 1479-1497 | UAUUAUUGUUACCCCCAAA | 748 | UUUGGGGGUAACAAUAAUA | 1317 |
| NM_001735.2_1492-1510_s | 1492-1510 | CCCAAAAGCCCAUAUAUUG | 749 | CAAUAUAUGGGCUUUUGGG | 1318 |
| NM_001735.2_1493-1511_s | 1493-1511 | CCAAAAGCCCAUAUAUUGA | 750 | UCAAUAUAUGGGCUUUUGG | 1319 |
| NM_001735.2_1494-1512_s | 1494-1512 | CAAAAGCCCAUAUAUUGAC | 751 | GUCAAUAUAUGGGCUUUUG | 1320 |
| NM_001735.2_1495-1513_s | 1495-1513 | AAAAGCCCAUAUAUUGACA | 752 | UGUCAAUAUAUGGGCUUUU | 1321 |
| NM_001735.2_1496-1514_s | 1496-1514 | AAAGCCCAUAUAUUGACAA | 753 | UUGUCAAUAUAUGGGCUUU | 1322 |
| NM_001735.2_1497-1515_s | 1497-1515 | AAGCCCAUAUAUUGACAAA | 754 | UUUGUCAAUAUAUGGGCUU | 1323 |
| NM_001735.2_1498-1516_s | 1498-1516 | AGCCCAUAUAUUGACAAAA | 755 | UUUUGUCAAUAUAUGGGCU | 1324 |
| NM_001735.2_1499-1517_s | 1499-1517 | GCCCAUAUAUUGACAAAAU | 756 | AUUUUGUCAAUAUAUGGGC | 1325 |
| NM_001735.2_1500-1518_s | 1500-1518 | CCCAUAUAUUGACAAAAUA | 757 | UAUUUUGUCAAUAUAUGGG | 1326 |
| NM_001735.2_1501-1519_s | 1501-1519 | CCAUAUAUUGACAAAAUAA | 758 | UUAUUUUGUCAAUAUAUGG | 1327 |
| NM_001735.2_1502-1520_s | 1502-1520 | CAUAUAUUGACAAAAUAAC | 759 | GUUAUUUUGUCAAUAUAUG | 1328 |
| NM_001735.2_1503-1521_s | 1503-1521 | AUAUAUUGACAAAAUAACU | 760 | AGUUAUUUUGUCAAUAUAU | 1329 |
| NM_001735.2_1504-1522_s | 1504-1522 | UAUAUUGACAAAAUAACUC | 761 | GAGUUAUUUUGUCAAUAUA | 1330 |
| NM_001735.2_1505-1523_s | 1505-1523 | AUAUUGACAAAAUAACUCA | 762 | UGAGUUAUUUUGUCAAUAU | 1331 |
| NM_001735.2_1506-1524_s | 1506-1524 | UAUUGACAAAAUAACUCAC | 763 | GUGAGUUAUUUUGUCAAUA | 1332 |
| NM_001735.2_1507-1525_s | 1507-1525 | AUUGACAAAAUAACUCACU | 764 | AGUGAGUUAUUUUGUCAAU | 1333 |
| NM_001735.2_1508-1526_s | 1508-1526 | UUGACAAAAUAACUCACUA | 765 | UAGUGAGUUAUUUUGUCAA | 1334 |
| NM_001735.2_1509-1527_s | 1509-1527 | UGACAAAAUAACUCACUAU | 766 | AUAGUGAGUUAUUUUGUCA | 1335 |
| NM_001735.2_1510-1528_s | 1510-1528 | GACAAAAUAACUCACUAUA | 767 | UAUAGUGAGUUAUUUUGUC | 1336 |
| NM_001735.2_1513-1531_s | 1513-1531 | AAAAUAACUCACUAUAAUU | 768 | AAUUAUAGUGAGUUAUUUU | 1337 |
| NM_001735.2_1514-1532_s | 1514-1532 | AAAUAACUCACUAUAAUUA | 769 | UAAUUAUAGUGAGUUAUUU | 1338 |
| NM_001735.2_1515-1533_s | 1515-1533 | AAUAACUCACUAUAAUUAC | 770 | GUAAUUAUAGUGAGUUAUU | 1339 |
| NM_001735.2_1516-1534_s | 1516-1534 | AUAACUCACUAUAAUUACU | 771 | AGUAAUUAUAGUGAGUUAU | 1340 |
| NM_001735.2_1518-1536_s | 1518-1536 | AACUCACUAUAAUUACUUG | 772 | CAAGUAAUUAUAGUGAGUU | 1341 |
| NM_001735.2_1519-1537_s | 1519-1537 | ACUCACUAUAAUUACUUGA | 773 | UCAAGUAAUUAUAGUGAGU | 1342 |
| NM_001735.2_1520-1538_s | 1520-1538 | CUCACUAUAAUUACUUGAU | 774 | AUCAAGUAAUUAUAGUGAG | 1343 |
| NM_001735.2_1521-1539_s | 1521-1539 | UCACUAUAAUUACUUGAUU | 775 | AAUCAAGUAAUUAUAGUGA | 1344 |
| NM_001735.2_1523-1541_s | 1523-1541 | ACUAUAAUUACUUGAUUUU | 776 | AAAAUCAAGUAAUUAUAGU | 1345 |
| NM_001735.2_1524-1542_s | 1524-1542 | CUAUAAUUACUUGAUUUUA | 777 | UAAAAUCAAGUAAUUAUAG | 1346 |
| NM_001735.2_1525-1543_s | 1525-1543 | UAUAAUUACUUGAUUUUAU | 778 | AUAAAAUCAAGUAAUUAUA | 1347 |
| NM_001735.2_1526-1544_s | 1526-1544 | AUAAUUACUUGAUUUUAUC | 779 | GAUAAAAUCAAGUAAUUAU | 1348 |
| NM_001735.2_1527-1545_s | 1527-1545 | UAAUUACUUGAUUUUAUCC | 780 | GGAUAAAAUCAAGUAAUUA | 1349 |
| NM_001735.2_1528-1546_s | 1528-1546 | AAUUACUUGAUUUUAUCCA | 781 | UGGAUAAAAUCAAGUAAUU | 1350 |
| NM_001735.2_1529-1547_s | 1529-1547 | AUUACUUGAUUUUAUCCAA | 782 | UUGGAUAAAAUCAAGUAAU | 1351 |
| NM_001735.2_1540-1558_s | 1540-1558 | UUAUCCAAGGGCAAAAUUA | 783 | UAAUUUUGCCCUUGGAUAA | 1352 |
| NM_001735.2_1550-1568_s | 1550-1568 | GCAAAAUUAUCCACUUUGG | 784 | CCAAAGUGGAUAAUUUUGC | 1353 |
| NM_001735.2_1561-1579_s | 1561-1579 | CACUUUGGCACGAGGGAGA | 785 | UCUCCCUCGUGCCAAAGUG | 1354 |
| NM_001735.2_1571-1589_s | 1571-1589 | CGAGGGAGAAAUUUUCAGA | 786 | UCUGAAAAUUUCUCCCUCG | 1355 |
| NM_001735.2_1581-1599_s | 1581-1599 | AUUUUCAGAUGCAUCUUAU | 787 | AUAAGAUGCAUCUGAAAAU | 1356 |
| NM_001735.2_1591-1609_s | 1591-1609 | GCAUCUUAUCAAAGUAUAA | 788 | UUAUACUUUGAUAAGAUGC | 1357 |
| NM_001735.2_1600-1618_s | 1600-1618 | CAAAGUAUAAACAUUCCAG | 789 | CUGGAAUGUUUAUACUUUG | 1358 |
| NM_001735.2_1612-1630_s | 1612-1630 | AUUCCAGUAACACAGAACA | 790 | UGUUCUGUGUUACUGGAAU | 1359 |
| NM_001735.2_1622-1640_s | 1622-1640 | CACAGAACAUGGUUCCUUC | 791 | GAAGGAACCAUGUUCUGUG | 1360 |
| NM_001735.2_1632-1650_s | 1632-1560 | GGUUCCUUCAUCCCGACUU | 792 | AAGUCGGGAUGAAGGAACC | 1361 |
| NM_001735.2_1643-1661_s | 1643-1661 | CCCGACUUCUGGUCUAUUA | 793 | UAAUAGACCAGAAGUCGGG | 1362 |
| NM_001735.2_1653-1671_s | 1653-1671 | GGUCUAUUACAUCGUCACA | 794 | UGUGACGAUGUAAUAGACC | 1363 |
| NM_001735.2_1663-1681_s | 1663-1681 | AUCGUCACAGGAGAACAGA | 795 | UCUGUUCUCCUGUGACGAU | 1364 |
| NM_001735.2_1670-1688_s | 1670-1688 | CAGGAGAACAGACAGCAGA | 796 | UCUGCUGUCUGUUCUCCUG | 1365 |
| NM_001735.2_1682-1700_s | 1682-1700 | CAGCAGAAUUAGUGUCUGA | 797 | UCAGACACUAAUUCUGCUG | 1366 |
| NM_001735.2_1693-1711_s | 1693-1711 | GUGUCUGAUUCAGUCUGGU | 798 | ACCAGACUGAAUCAGACAC | 1367 |
| NM_001735.2_1703-1721_s | 1703-1721 | CAGUCUGGUUAAAUAUUGA | 799 | UCAAUAUUUAACCAGACUG | 1368 |
| NM_001735.2_1710-1728_s | 1710-1728 | GUUAAAUAUUGAAGAAAAA | 800 | UUUUUCUUCAAUAUUUAAC | 1369 |
| NM_001735.2_1722-1740_s | 1722-1740 | AGAAAAAUGUGGCAACCAG | 801 | CUGGUUGCCACAUUUUUCU | 1370 |
| NM_001735.2_1733-1751_s | 1733-1751 | GCAACCAGCUCCAGGUUCA | 802 | UGAACCUGGAGCUGGUUGC | 1371 |
| NM_001735.2_1740-1758_s | 1740-1758 | GCUCCAGGUUCAUCUGUCU | 803 | AGACAGAUGAACCUGGAGC | 1372 |
| NM_001735.2_1751-1769_s | 1751-1769 | AUCUGUCUCCUGAUGCAGA | 804 | UCUGCAUCAGGAGACAGAU | 1373 |
| NM_001735.2_1762-1780_s | 1762-1780 | GAUGCAGAUGCAUAUUCUC | 805 | GAGAAUAUGCAUCUGCAUC | 1374 |
| NM_001735.2_1771-1789_s | 1771-1789 | GCAUAUUCUCCAGGCCAAA | 806 | UUUGGCCUGGAGAAUAUGC | 1375 |
| NM_001735.2_1782-1800_s | 1782-1800 | AGGCCAAACUGUGUCUCUU | 807 | AAGAGACACAGUUUGGCCU | 1376 |
| NM_001735.2_1792-1810_s | 1792-1810 | GUGUCUCUUAAUAUGGCAA | 808 | UUGCCAUAUUAAGAGACAC | 1377 |
| NM_001735.2_1799-1817_s | 1799-1817 | UUAAUAUGGCAACUGGAAU | 809 | AUUCCAGUUGCCAUAUUAA | 1378 |
| NM_001735.2_1809-1827_s | 1809-1827 | AACUGGAAUGGAUUCCUGG | 810 | CCAGGAAUCCAUUCCAGUU | 1379 |
| NM_001735.2_1821-1839_s | 1821-1839 | UUCCUGGGUGGCAUUAGCA | 811 | UGCUAAUGCCACCCAGGAA | 1380 |
| NM_001735.2_1830-1848_s | 1830-1848 | GGCAUUAGCAGCAGUGGAC | 812 | GUCCACUGCUGCUAAUGCC | 1381 |
| NM_001735.2_1842-1860_s | 1842-1860 | AGUGGACAGUGCUGUGUAU | 813 | AUACACAGCACUGUCCACU | 1382 |
| NM_001735.2_1852-1870_s | 1852-1870 | GCUGUGUAUGGAGUCCAAA | 814 | UUUGGACUCCAUACACAGC | 1383 |
| NM_001735.2_1863-1881_s | 1863-1881 | AGUCCAAAGAGGAGCCAAA | 815 | UUUGGCUCCUCUUUGGACU | 1384 |
| NM_001735.2_1870-1888_s | 1870-1888 | AGAGGAGCCAAAAAGCCCU | 816 | AGGGCUUUUUGGCUCCUCU | 1385 |
| NM_001735.2_1883-1901_s | 1883-1901 | AGCCCUUGGAAAGAGUAUU | 817 | AAUACUCUUUCCAAGGGCU | 1386 |
| NM_001735.2_1893-1911_s | 1893-1911 | AAGAGUAUUUCAAUUCUUA | 818 | UAAGAAUUGAAAUACUCUU | 1387 |
| NM_001735.2_1900-1918_s | 1900-1918 | UUUCAAUUCUUAGAGAAGA | 819 | UCUUCUCUAAGAAUUGAAA | 1388 |
| NM_001735.2_1912-1930_s | 1912-1930 | GAGAAGAGUGAUCUGGGCU | 820 | AGCCCAGAUCACUCUUCUC | 1389 |
| NM_001735.2_1920-1938_s | 1920-1938 | UGAUCUGGGCUGUGGGGCA | 821 | UGCCCCACAGCCCAGAUCA | 1390 |
| NM_001735.2_1933-1951_s | 1933-1951 | GGGGCAGGUGGUGGCCUCA | 822 | UGAGGCCACCACCUGCCCC | 1391 |
| NM_001735.2_1943-1961_s | 1943-1961 | GUGGCCUCAACAAUGCCAA | 823 | UUGGCAUUGUUGAGGCCAC | 1392 |
| NM_001735.2_1950-1968_s | 1950-1968 | CAACAAUGCCAAUGUGUUC | 824 | GAACACAUUGGCAUUGUUG | 1393 |
| NM_001735.2_1959-1977_s | 1959-1977 | CAAUGUGUUCCACCUAGCU | 825 | AGCUAGGUGGAACACAUUG | 1394 |
| NM_001735.2_1969-1987_s | 1969-1987 | CACCUAGCUGGACUUACCU | 826 | AGGUAAGUCCAGCUAGGUG | 1395 |
| NM_001735.2_1979-1997_s | 1979-1997 | GACUUACCUUCCUCACUAA | 827 | UUAGUGAGGAAGGUAAGUC | 1396 |
| NM_001735.2_1991-2009_s | 1991-2009 | UCACUAAUGCAAAUGCAGA | 828 | UCUGCAUUUGCAUUAGUGA | 1397 |
| NM_001735.2_2001-2019_s | 2001-2019 | AAAUGCAGAUGACUCCCAA | 829 | UUGGGAGUCAUCUGCAUUU | 1398 |
| NM_001735.2_2013-2031_s | 2013-2013 | CUCCCAAGAAAAUGAUGAA | 830 | UUCAUCAUUUUCUUGGGAG | 1399 |
| NM_001735.2_2032-2050_s | 2032-2050 | CCUUGUAAAGAAAUUCUCA | 831 | UGAGAAUUUCUUUACAAGG | 1400 |
| NM_001735.2_2043-2061_s | 2043-2061 | AAUUCUCAGGCCAAGAAGA | 832 | UCUUCUUGGCCUGAGAAUU | 1401 |
| NM_001735.2_2053-2071_s | 2053-2071 | CCAAGAAGAACGCUGCAAA | 833 | UUUGCAGCGUUCUUCUUGG | 1402 |
| NM_001735.2_2063-2081_s | 2063-2081 | CGCUGCAAAAGAAGAUAGA | 834 | UCUAUCUUCUUUUGCAGCG | 1403 |
| NM_001735.2_2070-2088_s | 2070-2088 | AAAGAAGAUAGAAGAAAUA | 835 | UAUUUCUUCUAUCUUCUUU | 1404 |
| NM_001735.2_2082-2100_s | 2082-2100 | AGAAAUAGCUGCUAAAUAU | 836 | AUAUUUAGCAGCUAUUUCU | 1405 |
| NM_001735.2_2089-2107_s | 2089-2107 | GCUGCUAAAUAUAAACAUU | 837 | AAUGUUUAUAUUUAGCAGC | 1406 |
| NM_001735.2_2103-2121_s | 2103-2121 | ACAUUCAGUAGUGAAGAAA | 838 | UUUCUUCACUACUGAAUGU | 1407 |
| NM_001735.2_2110-2128_s | 2110-2128 | GUAGUGAAGAAAUGUUGUU | 839 | AACAACAUUUCUUCACUAC | 1408 |
| NM_001735.2_2119-2137_s | 2119-2137 | AAAUGUUGUUACGAUGGAG | 840 | CUCCAUCGUAACAACAUUU | 1409 |
| NM_001735.2_2130-2148_s | 2130-2148 | CGAUGGAGCCUGCGUUAAU | 841 | AUUAACGCAGGCUCCAUCG | 1410 |
| NM_001735.2_2142-2160_s | 2142-2160 | CGUUAAUAAUGAUGAAACC | 842 | GGUUUCAUCAUUAUUAACG | 1411 |
| NM_001735.2_2150-2168_s | 2150-2168 | AUGAUGAAACCUGUGAGCA | 843 | UGCUCACAGGUUUCAUCAU | 1412 |
| NM_001735.2_2160-2178_s | 2160-2178 | CUGUGAGCAGCGAGCUGCA | 844 | UGCAGCUCGCUGCUCACAG | 1413 |
| NM_001735.2_2170-2188_s | 2170-2188 | CGAGCUGCACGGAUUAGUU | 845 | AACUAAUCCGUGCAGCUCG | 1414 |
| NM_001735.2_2180-2198_s | 2180-2198 | GGAUUAGUUUAGGGCCAAG | 846 | CUUGGCCCUAAACUAAUCC | 1415 |
| NM_001735.2_2191-2209_s | 2191-2209 | GGGCCAAGAUGCAUCAAAG | 847 | CUUUGAUGCAUCUUGGCCC | 1416 |
| NM_001735.2_2202-2220_s | 2202-2220 | CAUCAAAGCUUUCACUGAA | 848 | UUCAGUGAAAGCUUUGAUG | 1417 |
| NM_001735.2_2209-2227_s | 2209-2227 | GCUUUCACUGAAUGUUGUG | 849 | CACAACAUUCAGUGAAAGC | 1418 |
| NM_001735.2_2219-2237_s | 2219-2237 | AAUGUUGUGUCGUCGCAAG | 850 | CUUGCGACGACACAACAUU | 1419 |
| NM_001735.2_2229-2247_s | 2229-2247 | CGUCGCAAGCCAGCUCCGU | 851 | ACGGAGCUGGCUUGCGACG | 1420 |
| NM_001735.2_2241-2259_s | 2241-2259 | GCUCCGUGCUAAUAUCUCU | 852 | AGAGAUAUUAGCACGGAGC | 1421 |
| NM_001735.2_2249-2267_s | 2249-2267 | CUAAUAUCUCUCAUAAAGA | 853 | UCUUUAUGAGAGAUAUUAG | 1422 |
| NM_001735.2_2263-2281_s | 2263-2281 | AAAGACAUGCAAUUGGGAA | 854 | UUCCCAAUUGCAUGUCUUU | 1423 |
| NM_001735.2_2272-2290_s | 2272-2290 | CAAUUGGGAAGGCUACACA | 855 | UGUGUAGCCUUCCCAAUUG | 1424 |
| NM_001735.2_2283-2301_s | 2283-2301 | GCUACACAUGAAGACCCUG | 856 | CAGGGUCUUCAUGUGUAGC | 1425 |
| NM_001735.2_2289-2307_s | 2289-2307 | CAUGAAGACCCUGUUACCA | 857 | UGGUAACAGGGUCUUCAUG | 1426 |
| NM_001735.2_2303-2321_s | 2303-2321 | UACCAGUAAGCAAGCCAGA | 858 | UCUGGCUUGCUUACUGGUA | 1427 |
| NM_001735.2_2311-2329_s | 2311-2329 | AGCAAGCCAGAAAUUCGGA | 859 | UCCGAAUUUCUGGCUUGCU | 1428 |
| NM_001735.2_2319-2337_s | 2319-2337 | AGAAAUUCGGAGUUAUUUU | 860 | AAAAUAACUCCGAAUUUCU | 1429 |
| NM_001735.2_2329-2347_s | 2329-2347 | AGUUAUUUUCCAGAAAGCU | 861 | AGCUUUCUGGAAAAUAACU | 1430 |
| NM_001735.2_2339-2357_s | 2339-2357 | CAGAAAGCUGGUUGUGGGA | 862 | UCCCACAACCAGCUUUCUG | 1431 |
| NM_001735.2_2352-2370_s | 2352-2370 | GUGGGAAGUUCAUCUUGUU | 863 | AACAAGAUGAACUUCCCAC | 1432 |
| NM_001735.2_2361-2379_s | 2361-2379 | UCAUCUUGUUCCCAGAAGA | 864 | UCUUCUGGGAACAAGAUGA | 1433 |
| NM_001735.2_2372-2390_s | 2372-2390 | CCAGAAGAAAACAGUUGCA | 865 | UGCAACUGUUUUCUUCUGG | 1434 |
| NM_001735.2_2383-2401_s | 2383-2401 | CAGUUGCAGUUUGCCCUAC | 866 | GUAGGGCAAACUGCAACUG | 1435 |
| NM_001735.2_2389-2407_s | 2389-2407 | CAGUUUGCCCUACCUGAUU | 867 | AAUCAGGUAGGGCAAACUG | 1436 |
| NM_001735.2_2401-2419_s | 2401-2419 | CCUGAUUCUCUAACCACCU | 868 | AGGUGGUUAGAGAAUCAGG | 1437 |
| NM_001735.2_2413-2431_s | 2413-2431 | ACCACCUGGGAAAUUCAAG | 869 | CUUGAAUUUCCCAGGUGGU | 1438 |
| NM_001735.2_2422-2440_s | 2422-2440 | GAAAUUCAAGGCGUUGGCA | 870 | UGCCAACGCCUUGAAUUUC | 1439 |
| NM_001735.2_2433-2451_s | 2433-2451 | CGUUGGCAUUUCAAACACU | 871 | AGUGUUUGAAAUGCCAACG | 1440 |
| NM_001735.2_2439-2457_s | 2439-2457 | CAUUUCAAACACUGGUAUA | 872 | UAUACCAGUGUUUGAAAUG | 1441 |
| NM_001735.2_2453-2471_s | 2453-2471 | GUAUAUGUGUUGCUGAUAC | 873 | GUAUCAGCAACACAUAUAC | 1442 |
| NM_001735.2_2463-2481_s | 2463-2481 | UGCUGAUACUGUCAAGGCA | 874 | UGCCUUGACAGUAUCAGCA | 1443 |
| NM_001735.2_2471-2489_s | 2471-2489 | CUGUCAAGGCAAAGGUGUU | 875 | AACACCUUUGCCUUGACAG | 1444 |
| NM_001735.2_2483-2501_s | 2483-2501 | AGGUGUUCAAAGAUGUCUU | 876 | AAGACAUCUUUGAACACCU | 1445 |
| NM_001735.2_2490-2508_s | 2490-2508 | CAAAGAUGUCUUCCUGGAA | 877 | UUCCAGGAAGACAUCUUUG | 1446 |
| NM_001735.2_2499-2517_s | 2499-2517 | CUUCCUGGAAAUGAAUAUA | 878 | UAUAUUCAUUUCCAGGAAG | 1447 |
| NM_001735.2_2511-2529_s | 2511-2529 | GAAUAUACCAUAUUCUGUU | 879 | AACAGAAUAUGGUAUAUUC | 1448 |
| NM_001735.2_2520-2538_s | 2520-2538 | AUAUUCUGUUGUACGAGGA | 880 | UCCUCGUACAACAGAAUAU | 1449 |
| NM_001735.2_2533-2551_s | 2533-2551 | CGAGGAGAACAGAUCCAAU | 881 | AUUGGAUCUGUUCUCCUCG | 1450 |
| NM_001735.2_2539-2557_s | 2539-2557 | GAACAGAUCCAAUUGAAAG | 882 | CUUUCAAUUGGAUCUGUUC | 1451 |
| NM_001735.2_2553-2571_s | 2553-2571 | GAAAGGAACUGUUUACAAC | 883 | GUUGUAAACAGUUCCUUUC | 1452 |
| NM_001735.2_2560-2578_s | 2560-2578 | ACUGUUUACAACUAUAGGA | 884 | UCCUAUAGUUGUAAACAGU | 1453 |
| NM_001735.2_2569-2587_s | 2569-2587 | AACUAUAGGACUUCUGGGA | 885 | UCCCAGAAGUCCUAUAGUU | 1454 |
| NM_001735.2_2583-2601_s | 2583-2601 | UGGGAUGCAGUUCUGUGUU | 886 | AACACAGAACUGCAUCCCA | 1455 |
| NM_001735.2_2592-2610_s | 2592-2610 | GUUCUGUGUUAAAAUGUCU | 887 | AGACAUUUUAACACAGAAC | 1456 |
| NM_001735.2_2600-2618_s | 2600-2618 | UUAAAAUGUCUGCUGUGGA | 888 | UCCACAGCAGACAUUUUAA | 1457 |
| NM_001735.2_2612-2630_s | 2612-2630 | CUGUGGAGGGAAUCUGCAC | 889 | GUGCAGAUUCCCUCCACAG | 1458 |
| NM_001735.2_2620-2638_s | 2620-2638 | GGAAUCUGCACUUCGGAAA | 890 | UUUCCGAAGUGCAGAUUCC | 1459 |
| NM_001735.2_2633-2651_s | 2633-2651 | CGGAAAGCCCAGUCAUUGA | 891 | UCAAUGACUGGGCUUUCCG | 1460 |
| NM_001735.2_2641-2659_s | 2641-2659 | CCAGUCAUUGAUCAUCAGG | 892 | CCUGAUGAUCAAUGACUGG | 1461 |
| NM_001735.2_2653-2671_s | 2653-2671 | CAUCAGGGCACAAAGUCCU | 893 | AGGACUUUGUGCCCUGAUG | 1462 |
| NM_001735.2_2659-2677_s | 2659-2677 | GGCACAAAGUCCUCCAAAU | 894 | AUUUGGAGGACUUUGUGCC | 1463 |
| NM_001735.2_2673-2691_s | 2673-2691 | CAAAUGUGUGCGCCAGAAA | 895 | UUUCUGGCGCACACAUUUG | 1464 |
| NM_001735.2_2682-2700_s | 2682-2700 | GCGCCAGAAAGUAGAGGGC | 896 | GCCCUCUACUUUCUGGCGC | 1465 |
| NM_001735.2_2691-2709_s | 2691-2709 | AGUAGAGGGCUCCUCCAGU | 897 | ACUGGAGGAGCCCUCUACU | 1466 |
| NM_001735.2_2702-2720_s | 2702-2720 | CCUCCAGUCACUUGGUGAC | 898 | GUCACCAAGUGACUGGAGG | 1467 |
| NM_001735.2_2709-2727_s | 2709-2727 | UCACUUGGUGACAUUCACU | 899 | AGUGAAUGUCACCAAGUGA | 1468 |
| NM_001735.2_2720-2738_s | 2720-2738 | CAUUCACUGUGCUUCCUCU | 900 | AGAGGAAGCACAGUGAAUG | 1469 |
| NM_001735.2_2739-2757_s | 2739-2757 | GGAAAUUGGCCUUCACAAC | 901 | GUUGUGAAGGCCAAUUUCC | 1470 |
| NM_001735.2_2749-2767_s | 2749-2767 | CUUCACAACAUCAAUUUUU | 902 | AAAAAUUGAUGUUGUGAAG | 1471 |
| NM_001735.2_2761-2779_s | 2761-2779 | AAUUUUUCACUGGAGACUU | 903 | AAGUCUCCAGUGAAAAAUU | 1472 |
| NM_001735.2_2770-2788_s | 2770-2788 | CUGGAGACUUGGUUUGGAA | 904 | UUCCAAACCAAGUCUCCAG | 1473 |
| NM_001735.2_2780-2798_s | 2780-2798 | GGUUUGGAAAAGAAAUCUU | 905 | AAGAUUUCUUUUCCAAACC | 1474 |
| NM_001735.2_2793-2811_s | 2793-2811 | AAUCUUAGUAAAAACAUUA | 906 | UAAUGUUUUUACUAAGAUU | 1475 |
| NM_001735.2_2802-2820_s | 2802-2820 | AAAAACAUUACGAGUGGUG | 907 | CACCACUCGUAAUGUUUUU | 1476 |
| NM_001735.2_2813-2831_s | 2813-2831 | GAGUGGUGCCAGAAGGUGU | 908 | ACACCUUCUGGCACCACUC | 1477 |
| NM_001735.2_2823-2841_s | 2823-2841 | AGAAGGUGUCAAAAGGGAA | 909 | UUCCCUUUUGACACCUUCU | 1478 |
| NM_001735.2_2829-2847_s | 2829-2847 | UGUCAAAAGGGAAAGCUAU | 910 | AUAGCUUUCCCUUUUGACA | 1479 |
| NM_001735.2_2843-2861_s | 2843-2861 | GCUAUUCUGGUGUUACUUU | 911 | AAAGUAACACCAGAAUAGC | 1480 |
| NM_001735.2_2852-2870_s | 2852-2870 | GUGUUACUUUGGAUCCUAG | 912 | CUAGGAUCCAAAGUAACAC | 1481 |
| NM_001735.2_2862-2880_s | 2862-2880 | GGAUCCUAGGGGUAUUUAU | 913 | AUAAAUACCCCUAGGAUCC | 1482 |
| NM_001735.2_2872-2890_s | 2872-2890 | GGUAUUUAUGGUACCAUUA | 914 | UAAUGGUACCAUAAAUACC | 1483 |
| NM_001735.2_2882-2900_s | 2882-2900 | GUACCAUUAGCAGACGAAA | 915 | UUUCGUCUGCUAAUGGUAC | 1484 |
| NM_001735.2_2892-2910_s | 2892-2910 | CAGACGAAAGGAGUUCCCA | 916 | UGGGAACUCCUUUCGUCUG | 1485 |
| NM_001735.2_2900-2918_s | 2900-2918 | AGGAGUUCCCAUACAGGAU | 917 | AUCCUGUAUGGGAACUCCU | 1486 |
| NM_001735.2_2909-2927_s | 2909-2927 | CAUACAGGAUACCCUUAGA | 918 | UCUAAGGGUAUCCUGUAUG | 1487 |
| NM_001735.2_2922-2940_s | 2922-2940 | CUUAGAUUUGGUCCCCAAA | 919 | UUUGGGGACCAAAUCUAAG | 1488 |
| NM_001735.2_2933-2951_s | 2933-2951 | UCCCCAAAACAGAAAUCAA | 920 | UUGAUUUCUGUUUUGGGGA | 1489 |
| NM_001735.2_2941-2959_s | 2941-2959 | ACAGAAAUCAAAAGGAUUU | 921 | AAAUCCUUUUGAUUUCUGU | 1490 |
| NM_001735.2_2951-2969_s | 2951-2969 | AAAGGAUUUUGAGUGUAAA | 922 | UUUACACUCAAAAUCCUUU | 1491 |
| NM_001735.2_2962-2980_s | 2962-2980 | AGUGUAAAAGGACUGCUUG | 923 | CAAGCAGUCCUUUUACACU | 1492 |
| NM_001735.2_2969-2987_s | 2969-2987 | AAGGACUGCUUGUAGGUGA | 924 | UCACCUACAAGCAGUCCUU | 1493 |
| NM_001735.2_2980-2998_s | 2980-2998 | GUAGGUGAGAUCUUGUCUG | 925 | CAGACAAGAUCUCACCUAC | 1494 |
| NM_001735.2_2989-3007_s | 2989-3007 | AUCUUGUCUGCAGUUCUAA | 926 | UUAGAACUGCAGACAAGAU | 1495 |
| NM_001735.2_3001-3019_s | 3001-3019 | GUUCUAAGUCAGGAAGGCA | 927 | UGCCUUCCUGACUUAGAAC | 1496 |
| NM_001735.2_3013-3031_s | 3013-3031 | GAAGGCAUCAAUAUCCUAA | 928 | UUAGGAUAUUGAUGCCUUC | 1497 |
| NM_001735.2_3020-3038_s | 3020-3038 | UCAAUAUCCUAACCCACCU | 929 | AGGUGGGUUAGGAUAUUGA | 1498 |
| NM_001735.2_3033-3051_s | 3033-3051 | CCACCUCCCCAAAGGGAGU | 930 | ACUCCCUUUGGGGAGGUGG | 1499 |
| NM_001735.2_3039-3057_s | 3039-3057 | CCCCAAAGGGAGUGCAGAG | 931 | CUCUGCACUCCCUUUGGGG | 1500 |
| NM_001735.2_3050-3068_s | 3050-3068 | GUGCAGAGGCGGAGCUGAU | 932 | AUCAGCUCCGCCUCUGCAC | 1501 |
| NM_001735.2_3060-3078_s | 3060-3078 | GGAGCUGAUGAGCGUUGUC | 933 | GACAACGCUCAUCAGCUCC | 1502 |
| NM_001735.2_3072-3090_s | 3072-3090 | CGUUGUCCCAGUAUUCUAU | 934 | AUAGAAUACUGGGACAACG | 1503 |
| NM_001735.2_3079-3097_s | 3079-3097 | CCAGUAUUCUAUGUUUUUC | 935 | GAAAAACAUAGAAUACUGG | 1504 |
| NM_001735.2_3091-3109_s | 3091-3109 | GUUUUUCACUACCUGGAAA | 936 | UUUCCAGGUAGUGAAAAAC | 1505 |
| NM_001735.2_3102-3120_s | 3102-3120 | CCUGGAAACAGGAAAUCAU | 937 | AUGAUUUCCUGUUUCCAGG | 1506 |
| NM_001735.2_3122-3140_s | 3122-3140 | GGAACAUUUUUCAUUCUGA | 938 | UCAGAAUGAAAAAUGUUCC | 1507 |
| NM_001735.2_3133-3151_s | 3133-3151 | CAUUCUGACCCAUUAAUUG | 939 | CAAUUAAUGGGUCAGAAUG | 1508 |
| NM_001735.2_3142-3160_s | 3142-3160 | CCAUUAAUUGAAAAGCAGA | 940 | UCUGCUUUUCAAUUAAUGG | 1509 |
| NM_001735.2_3153-3171_s | 3153-3171 | AAAGCAGAAACUGAAGAAA | 941 | UUUCUUCAGUUUCUGCUUU | 1510 |
| NM_001735.2_3161-3179_s | 3161-3179 | AACUGAAGAAAAAAUUAAA | 942 | UUUAAUUUUUUCUUCAGUU | 1511 |
| NM_001735.2_3169-3187_s | 3169-3187 | AAAAAAUUAAAAGAAGGGA | 943 | UCCCUUCUUUUAAUUUUUU | 1512 |
| NM_001735.2_3183-3201_s | 3183-3201 | AGGGAUGUUGAGCAUUAUG | 944 | CAUAAUGCUCAACAUCCCU | 1513 |
| NM_001735.2_3192-3210_s | 3192-3210 | GAGCAUUAUGUCCUACAGA | 945 | UCUGUAGGACAUAAUGCUC | 1514 |
| NM_001735.2_3200-3218_s | 3200-3218 | UGUCCUACAGAAAUGCUGA | 946 | UCAGCAUUUCUGUAGGACA | 1515 |
| NM_001735.2_3211-3229_s | 3211-3229 | AAUGCUGACUACUCUUACA | 947 | UGUAAGAGUAGUCAGCAUU | 1516 |
| NM_001735.2_3220-3238_s | 3220-3238 | UACUCUUACAGUGUGUGGA | 948 | UCCACACACUGUAAGAGUA | 1517 |
| NM_001735.2_3229-3247_s | 3229-3247 | AGUGUGUGGAAGGGUGGAA | 949 | UUCCACCCUUCCACACACU | 1518 |
| NM_001735.2_3240-3258_s | 3240-3258 | GGGUGGAAGUGCUAGCACU | 950 | AGUGCUAGCACUUCCACCC | 1519 |
| NM_001735.2_3250-3268_s | 3250-3268 | GCUAGCACUUGGUUAACAG | 951 | CUGUUAACCAAGUGCUAGC | 1520 |
| NM_001735.2_3260-3278_s | 3260-3278 | GGUUAACAGCUUUUGCUUU | 952 | AAAGCAAAAGCUGUUAACC | 1521 |
| NM_001735.2_3273-3291_s | 3273-3291 | UGCUUUAAGAGUACUUGGA | 953 | UCCAAGUACUCUUAAAGCA | 1522 |
| NM_001735.2_3283-3301_s | 3283-3301 | GUACUUGGACAAGUAAAUA | 954 | UAUUUACUUGUCCAAGUAC | 1523 |
| NM_001735.2_3292-3310_s | 3292-3317 | CAAGUAAAUAAAUACGUAG | 955 | CUACGUAUUUAUUUACUUG | 1524 |
| NM_001735.2_3299-3317_s | 3299-3317 | AUAAAUACGUAGAGCAGAA | 956 | UUCUGCUCUACGUAUUUAU | 1525 |
| NM_001735.2_3310-3328_s | 3310-3328 | GAGCAGAACCAAAAUUCAA | 957 | UUGAAUUUUGGUUCUGCUC | 1526 |
| NM_001735.2_3322-3340_s | 3322-3340 | AAUUCAAUUUGUAAUUCUU | 958 | AAGAAUUACAAAUUGAAUU | 1527 |
| NM_001735.2_3332-3350_s | 3332-3350 | GUAAUUCUUUAUUGUGGCU | 959 | AGCCACAAUAAAGAAUUAC | 1528 |
| NM_001735.2_3342-3360_s | 3342-3360 | AUUGUGGCUAGUUGAGAAU | 960 | AUUCUCAACUAGCCACAAU | 1529 |
| NM_001735.2_3349-3367_s | 3349-3367 | CUAGUUGAGAAUUAUCAAU | 961 | AUUGAUAAUUCUCAACUAG | 1530 |
| NM_001735.2_3360-3378_s | 3360-3378 | UUAUCAAUUAGAUAAUGGA | 962 | UCCAUUAUCUAAUUGAUAA | 1531 |
| NM_001735.2_3373-3391_s | 3373-3391 | AAUGGAUCUUUCAAGGAAA | 963 | UUUCCUUGAAAGAUCCAUU | 1532 |
| NM_001735.2_3380-3398_s | 3380-3398 | CUUUCAAGGAAAAUUCACA | 964 | UGUGAAUUUUCCUUGAAAG | 1533 |
| NM_001735.2_3391-3409_s | 3391-3409 | AAUUCACAGUAUCAACCAA | 965 | UUGGUUGAUACUGUGAAUU | 1534 |
| NM_001735.2_3399-3417_s | 3399-3417 | GUAUCAACCAAUAAAAUUA | 966 | UAAUUUUAUUGGUUGAUAC | 1535 |
| NM_001735.2_3411-3429_s | 3411-3429 | AAAAUUACAGGGUACCUUG | 967 | CAAGGUACCCUGUAAUUUU | 1536 |
| NM_001735.2_3419-3437_s | 3419-3437 | AGGGUACCUUGCCUGUUGA | 968 | UCAACAGGCAAGGUACCCU | 1537 |
| NM_001735.2_3433-3451_s | 3433-3451 | GUUGAAGCCCGAGAGAACA | 969 | UGUUCUCUCGGGCUUCAAC | 1538 |
| NM_001735.2_3441-3459_s | 3441-3559 | CCGAGAGAACAGCUUAUAU | 970 | AUAUAAGCUGUUCUCUCGG | 1539 |
| NM_001735.2_3452-3470_s | 3452-3470 | GCUUAUAUCUUACAGCCUU | 971 | AAGGCUGUAAGAUAUAAGC | 1540 |
| NM_001735.2_3460-3478_s | 3460-3478 | CUUACAGCCUUUACUGUGA | 972 | UCACAGUAAAGGCUGUAAG | 1541 |
| NM_001735.2_3482-3500_s | 3482-3500 | GAAUUAGAAAGGCUUUCGA | 973 | UCGAAAGCCUUUCUAAUUC | 1542 |
| NM_001735.2_3492-3510_s | 3492-3510 | GGCUUUCGAUAUAUGCCCC | 974 | GGGGCAUAUAUCGAAAGCC | 1543 |
| NM_001735.2_3499-3517_s | 3499-3517 | GAUAUAUGCCCCCUGGUGA | 975 | UCACCAGGGGGCAUAUAUC | 1544 |
| NM_001735.2_3513-3531_s | 3513-3531 | GGUGAAAAUCGACACAGCU | 976 | AGCUGUGUCGAUUUUCACC | 1545 |
| NM_001735.2_3522-3540_s | 3522-3540 | CGACACAGCUCUAAUUAAA | 977 | UUUAAUUAGAGCUGUGUCG | 1546 |
| NM_001735.2_3529-3547_s | 3529-3547 | GCUCUAAUUAAAGCUGACA | 978 | UGUCAGCUUUAAUUAGAGC | 1547 |
| NM_001735.2_3542-3560_s | 3542-3560 | CUGACAACUUUCUGCUUGA | 979 | UCAAGCAGAAAGUUGUCAG | 1548 |
| NM_001735.2_3549-3567_s | 3549-3567 | CUUUCUGCUUGAAAAUACA | 980 | UGUAUUUUCAAGCAGAAAG | 1549 |
| NM_001735.2_3560-3578_s | 3560-3578 | AAAAUACACUGCCAGCCCA | 981 | UGGGCUGGCAGUGUAUUUU | 1550 |
| NM_001735.2_3573-3591_s | 3573-3591 | AGCCCAGAGCACCUUUACA | 982 | UGUAAAGGUGCUCUGGGCU | 1551 |
| NM_001735.2_3581-3599_s | 3581-3599 | GCACCUUUACAUUGGCCAU | 983 | AUGGCCAAUGUAAAGGUGC | 1552 |
| NM_001735.2_3589-3607_s | 3589-3607 | ACAUUGGCCAUUUCUGCGU | 984 | ACGCAGAAAUGGCCAAUGU | 1553 |
| NM_001735.2_3602-3620_s | 3602-3620 | CUGCGUAUGCUCUUUCCCU | 985 | AGGGAAAGAGCAUACGCAG | 1554 |
| NM_001735.2_3613-3631_s | 3613-3631 | CUUUCCCUGGGAGAUAAAA | 986 | UUUUAUCUCCCAGGGAAAG | 1555 |
| NM_001735.2_3623-3641_s | 3623-3641 | GAGAUAAAACUCACCCACA | 987 | UGUGGGUGAGUUUUAUCUC | 1556 |
| NM_001735.2_3631-3649_s | 3631-3649 | ACUCACCCACAGUUUCGUU | 988 | AACGAAACUGUGGGUGAGU | 1557 |
| NM_001735.2_3640-3658_s | 3640-3658 | CAGUUUCGUUCAAUUGUUU | 989 | AAACAAUUGAACGAAACUG | 1558 |
| NM_001735.2_3650-3668_s | 3650-3668 | CAAUUGUUUCAGCUUUGAA | 990 | UUCAAAGCUGAAACAAUUG | 1559 |
| NM_001735.2_3662-3680_s | 3662-3680 | CUUUGAAGAGAGAAGCUUU | 991 | AAAGCUUCUCUCUUCAAAG | 1560 |
| NM_001735.2_3669-3687_s | 3669-3687 | GAGAGAAGCUUUGGUUAAA | 992 | UUUAACCAAAGCUUCUCUC | 1561 |
| NM_001735.2_3682-3700_s | 3682-3700 | GUUAAAGGUAAUCCACCCA | 993 | UGGGUGGAUUACCUUUAAC | 1562 |
| NM_001735.2_3691-3709_s | 3691-3709 | AAUCCACCCAUUUAUCGUU | 994 | AACGAUAAAUGGGUGGAUU | 1563 |
| NM_001735.2_3699-3717_s | 3699-3717 | CAUUUAUCGUUUUUGGAAA | 995 | UUUCCAAAAACGAUAAAUG | 1564 |
| NM_001735.2_3710-3728_s | 3710-3728 | UUUGGAAAGACAAUCUUCA | 996 | UGAAGAUUGUCUUUCCAAA | 1565 |
| NM_001735.2_3721-3739_s | 3721-3739 | AAUCUUCAGCAUAAAGACA | 997 | UGUCUUUAUGCUGAAGAUU | 1566 |
| NM_001735.2_3730-3748_s | 3730-3748 | CAUAAAGACAGCUCUGUAC | 998 | GUACAGAGCUGUCUUUAUG | 1567 |
| NM_001735.2_3741-3759_s | 3741-3759 | CUCUGUACCUAACACUGGU | 999 | ACCAGUGUUAGGUACAGAG | 1568 |
| NM_001735.2_3752-3770_s | 3752-3770 | ACACUGGUACGGCACGUAU | 1000 | AUACGUGCCGUACCAGUGU | 1569 |
| NM_001735.2_3762-3780_s | 3762-3780 | GGCACGUAUGGUAGAAACA | 1001 | UGUUUCUACCAUACGUGCC | 1570 |
| NM_001735.2_3771-3789_s | 3771-3789 | GGUAGAAACAACUGCCUAU | 1002 | AUAGGCAGUUGUUUCUACC | 1571 |
| NM_001735.2_3779-3797_s | 3779-3797 | CAACUGCCUAUGCUUUACU | 1003 | AGUAAAGCAUAGGCAGUUG | 1572 |
| NM_001735.2_3791-3809_s | 3791-3809 | CUUUACUCACCAGUCUGAA | 1004 | UUCAGACUGGUGAGUAAAG | 1573 |
| NM_001735.2_3803-3821_s | 3803-3821 | GUCUGAACUUGAAAGAUAU | 1005 | AUAUCUUUCAAGUUCAGAC | 1574 |
| NM_001735.2_3809-3827_s | 3809-3827 | ACUUGAAAGAUAUAAAUUA | 1006 | UAAUUUAUAUCUUUCAAGU | 1575 |
| NM_001735.2_3819-3837_s | 3819-3837 | UAUAAAUUAUGUUAACCCA | 1007 | UGGGUUAACAUAAUUUAUA | 1576 |
| NM_001735.2_3829-3847_s | 3829-3847 | GUUAACCCAGUCAUCAAAU | 1008 | AUUUGAUGACUGGGUUAAC | 1577 |
| NM_001735.2_3839-3857_s | 3839-3857 | UCAUCAAAUGGCUAUCAGA | 1009 | UCUGAUAGCCAUUUGAUGA | 1578 |
| NM_001735.2_3851-3869_s | 3851-3869 | UAUCAGAAGAGCAGAGGUA | 1010 | UACCUCUGCUCUUCUGAUA | 1579 |
| NM_001735.2_3863-3881_s | 3863-3881 | AGAGGUAUGGAGGUGGCUU | 1011 | AAGCCACCUCCAUACCUCU | 1580 |
| NM_001735.2_3872-3890_s | 3872-3890 | GAGGUGGCUUUUAUUCAAC | 1012 | GUUGAAUAAAAGCCACCUC | 1581 |
| NM_001735.2_3883-3901_s | 3883-3901 | UAUUCAACCCAGGACACAA | 1013 | UUGUGUCCUGGGUUGAAUA | 1582 |
| NM_001735.2_3893-3911_s | 3893-3911 | AGGACACAAUCAAUGCCAU | 1014 | AUGGCAUUGAUUGUGUCCU | 1583 |
| NM_001735.2_3899-3917_s | 3899-3917 | CAAUCAAUGCCAUUGAGGG | 1015 | CCCUCAAUGGCAUUGAUUG | 1584 |
| NM_001735.2_3909-3927_s | 3909-3927 | CAUUGAGGGCCUGACGGAA | 1016 | UUCCGUCAGGCCCUCAAUG | 1585 |
| NM_001735.2_3922-3940_s | 3922-3940 | ACGGAAUAUUCACUCCUGG | 1017 | CCAGGAGUGAAUAUUCCGU | 1586 |
| NM_001735.2_3930-3948_s | 3930-3948 | UUCACUCCUGGUUAAACAA | 1018 | UUGUUUAACCAGGAGUGAA | 1587 |
| NM_001735.2_3939-3957_s | 3939-3957 | GGUUAAACAACUCCGCUUG | 1019 | CAAGCGGAGUUGUUUAACC | 1588 |
| NM_001735.2_3951-3969_s | 3951-3969 | CCGCUUGAGUAUGGACAUC | 1020 | GAUGUCCAUACUCAAGCGG | 1589 |
| NM_001735.2_3963-3981_s | 3963-3981 | GGACAUCGAUGUUUCUUAC | 1021 | GUAAGAAACAUCGAUGUCC | 1590 |
| NM_001735.2_3969-3987_s | 3969-3987 | CGAUGUUUCUUACAAGCAU | 1022 | AUGCUUGUAAGAAACAUCG | 1591 |
| NM_001735.2_3981-3999_s | 3981-3999 | CAAGCAUAAAGGUGCCUUA | 1023 | UAAGGCACCUUUAUGCUUG | 1592 |
| NM_001735.2_3992-4010_s | 3992-4010 | GUGCCUUACAUAAUUAUAA | 1024 | UUAUAAUUAUGUAAGGCAC | 1593 |
| NM_001735.2_3999-4017_s | 3999-4017 | ACAUAAUUAUAAAAUGACA | 1025 | UGUCAUUUUAUAAUUAUGU | 1594 |
| NM_001735.2_4009-4027_s | 4009-4027 | AAAAUGACAGACAAGAAUU | 1026 | AAUUCUUGUCUGUCAUUUU | 1595 |
| NM_001735.2_4020-4038_s | 4020-4038 | CAAGAAUUUCCUUGGGAGG | 1027 | CCUCCCAAGGAAAUUCUUG | 1596 |
| NM_001735.2_4029-4047_s | 4029-4047 | CCUUGGGAGGCCAGUAGAG | 1028 | CUCUACUGGCCUCCCAAGG | 1597 |
| NM_001735.2_4041-4059_s | 4041-4059 | AGUAGAGGUGCUUCUCAAU | 1029 | AUUGAGAAGCACCUCUACU | 1598 |
| NM_001735.2_4051-4069_s | 4051-4069 | CUUCUCAAUGAUGACCUCA | 1030 | UGAGGUCAUCAUUGAGAAG | 1599 |
| NM_001735.2_4062-4080_s | 4062-4080 | UGACCUCAUUGUCAGUACA | 1031 | UGUACUGACAAUGAGGUCA | 1600 |
| NM_001735.2_4072-4090_s | 4072-4090 | GUCAGUACAGGAUUUGGCA | 1032 | UGCCAAAUCCUGUACUGAC | 1601 |
| NM_001735.2_4080-4098_s | 4080-4098 | AGGAUUUGGCAGUGGCUUG | 1033 | CAAGCCACUGCCAAAUCCU | 1602 |
| NM_001735.2_4092-4110_s | 4092-4110 | UGGCUUGGCUACAGUACAU | 1034 | AUGUACUGUAGCCAAGCCA | 1603 |
| NM_001735.2_4099-4117_s | 4099-4117 | GCUACAGUACAUGUAACAA | 1035 | UUGUUACAUGUACUGUAGC | 1604 |
| NM_001735.2_4113-4131_s | 4113-4131 | AACAACUGUAGUUCACAAA | 1036 | UUUGUGAACUACAGUUGUU | 1605 |
| NM_001735.2_4120-4138_s | 4120-4138 | GUAGUUCACAAAACCAGUA | 1037 | UACUGGUUUUGUGAACUAC | 1606 |
| NM_001735.2_4130-4148_s | 4130-4148 | AAACCAGUACCUCUGAGGA | 1038 | UCCUCAGAGGUACUGGUUU | 1607 |
| NM_001735.2_4143-4161_s | 4143-4161 | UGAGGAAGUUUGCAGCUUU | 1039 | AAAGCUGCAAACUUCCUCA | 1608 |
| NM_001735.2_4153-4171_s | 4153-4171 | UGCAGCUUUUAUUUGAAAA | 1040 | UUUUCAAAUAAAAGCUGCA | 1609 |
| NM_001735.2_4163-4181_s | 4163-4181 | AUUUGAAAAUCGAUACUCA | 1041 | UGAGUAUCGAUUUUCAAAU | 1610 |
| NM_001735.2_4173-4191_s | 4173-4191 | CGAUACUCAGGAUAUUGAA | 1042 | UUCAAUAUCCUGAGUAUCG | 1611 |
| NM_001735.2_4182-4200_s | 4182-4200 | GGAUAUUGAAGCAUCCCAC | 1043 | GUGGGAUGCUUCAAUAUCC | 1612 |
| NM_001735.2_4189-4207_s | 4189-4207 | GAAGCAUCCCACUACAGAG | 1044 | CUCUGUAGUGGGAUGCUUC | 1613 |
| NM_001735.2_4199-4217_s | 4199-4217 | ACUACAGAGGCUACGGAAA | 1045 | UUUCCGUAGCCUCUGUAGU | 1614 |
| NM_001735.2_4212-4230_s | 4212-4230 | CGGAAACUCUGAUUACAAA | 1046 | UUUGUAAUCAGAGUUUCCG | 1615 |
| NM_001735.2_4221-4239_s | 4221-4239 | UGAUUACAAACGCAUAGUA | 1047 | UACUAUGCGUUUGUAAUCA | 1616 |
| NM_001735.2_4232-4250_s | 4232-4250 | GCAUAGUAGCAUGUGCCAG | 1048 | CUGGCACAUGCUACUAUGC | 1617 |
| NM_001735.2_4240-4258_s | 4240-4258 | GCAUGUGCCAGCUACAAGC | 1049 | GCUUGUAGCUGGCACAUGC | 1618 |
| NM_001735.2_4251-4269_s | 4251-4269 | CUACAAGCCCAGCAGGGAA | 1050 | UUCCCUGCUGGGCUUGUAG | 1619 |
| NM_001735.2_4260-4278_s | 4260-4278 | CAGCAGGGAAGAAUCAUCA | 1051 | UGAUGAUUCUUCCCUGCUG | 1620 |
| NM_001735.2_4270-4288_s | 4270-4288 | GAAUCAUCAUCUGGAUCCU | 1052 | AGGAUCCAGAUGAUGAUUC | 1621 |
| NM_001735.2_4283-4301_s | 4283-4301 | GAUCCUCUCAUGCGGUGAU | 1053 | AUCACCGCAUGAGAGGAUC | 1622 |
| NM_001735.2_4289-4307_s | 4289-4307 | CUCAUGCGGUGAUGGACAU | 1054 | AUGUCCAUCACCGCAUGAG | 1623 |
| NM_001735.2_4299-4317_s | 4299-4317 | GAUGGACAUCUCCUUGCCU | 1055 | AGGCAAGGAGAUGUCCAUC | 1624 |
| NM_001735.2_4311-4329_s | 4311-4329 | CUUGCCUACUGGAAUCAGU | 1056 | ACUGAUUCCAGUAGGCAAG | 1625 |
| NM_001735.2_4322-4340_s | 4322-4340 | GAAUCAGUGCAAAUGAAGA | 1057 | UCUUCAUUUGCACUGAUUC | 1626 |
| NM_001735.2_4332-4350_s | 4332-4350 | AAAUGAAGAAGACUUAAAA | 1058 | UUUUAAGUCUUCUUCAUUU | 1627 |
| NM_001735.2_4339-4357_s | 4339-4357 | GAAGACUUAAAAGCCCUUG | 1059 | CAAGGGCUUUUAAGUCUUC | 1628 |
| NM_001735.2_4353-4371_s | 4353-4371 | CCUUGUGGAAGGGGUGGAU | 1060 | AUCCACCCCUUCCACAAGG | 1629 |
| NM_001735.2_4360-4378_s | 4360-4378 | GAAGGGGUGGAUCAACUAU | 1061 | AUAGUUGAUCCACCCCUUC | 1630 |
| NM_001735.2_4370-4388_s | 4370-4388 | AUCAACUAUUCACUGAUUA | 1062 | UAAUCAGUGAAUAGUUGAU | 1631 |
| NM_001735.2_4380-4398_s | 4380-4398 | CACUGAUUACCAAAUCAAA | 1063 | UUUGAUUUGGUAAUCAGUG | 1632 |
| NM_001735.2_4393-4411_s | 4393-4411 | AUCAAAGAUGGACAUGUUA | 1064 | UAACAUGUCCAUCUUUGAU | 1633 |
| NM_001735.2_4402-4420_s | 4402-4420 | GGACAUGUUAUUCUGCAAC | 1065 | GUUGCAGAAUAACAUGUCC | 1634 |
| NM_001735.2_4413-4431_s | 4413-4431 | UCUGCAACUGAAUUCGAUU | 1066 | AAUCGAAUUCAGUUGCAGA | 1635 |
| NM_001735.2_4422-4440_s | 4422-4440 | GAAUUCGAUUCCCUCCAGU | 1067 | ACUGGAGGGAAUCGAAUUC | 1636 |
| NM_001735.2_4432-4450_s | 4432-4450 | CCCUCCAGUGAUUUCCUUU | 1068 | AAAGGAAAUCACUGGAGGG | 1637 |
| NM_001735.2_4441-4459_s | 4441-4459 | GAUUUCCUUUGUGUACGAU | 1069 | AUCGUACACAAAGGAAAUC | 1638 |
| NM_001735.2_4453-4471_s | 4453-4471 | GUACGAUUCCGGAUAUUUG | 1070 | CAAAUAUCCGGAAUCGUAC | 1639 |
| NM_001735.2_4462-4480_s | 4462-4480 | CGGAUAUUUGAACUCUUUG | 1071 | CAAAGAGUUCAAAUAUCCG | 1640 |
| NM_001735.2_4473-4491_s | 4473-4491 | ACUCUUUGAAGUUGGGUUU | 1072 | AAACCCAACUUCAAAGAGU | 1641 |
| NM_001735.2_4482-4500_s | 4482-4500 | AGUUGGGUUUCUCAGUCCU | 1073 | AGGACUGAGAAACCCAACU | 1642 |
| NM_001735.2_4490-4508_s | 4490-4508 | UUCUCAGUCCUGCCACUUU | 1074 | AAAGUGGCAGGACUGAGAA | 1643 |
| NM_001735.2_4503-4521_s | 4503-4521 | CACUUUCACAGUGUACGAA | 1075 | UUCGUACACUGUGAAAGUG | 1644 |
| NM_001735.2_4509-4527_s | 4509-4527 | CACAGUGUACGAAUACCAC | 1076 | GUGGUAUUCGUACACUGUG | 1645 |
| NM_001735.2_4523-4541_s | 4523-4541 | ACCACAGACCAGAUAAACA | 1077 | UGUUUAUCUGGUCUGUGGU | 1646 |
| NM_001735.2_4531-4549_s | 4531-4549 | CCAGAUAAACAGUGUACCA | 1078 | UGGUACACUGUUUAUCUGG | 1647 |
| NM_001735.2_4540-4558_s | 4540-4558 | CAGUGUACCAUGUUUUAUA | 1079 | UAUAAAACAUGGUACACUG | 1648 |
| NM_001735.2_4551-4569_s | 4551-4569 | GUUUUAUAGCACUUCCAAU | 1080 | AUUGGAAGUGCUAUAAAAC | 1649 |
| NM_001735.2_4562-4580_s | 4562-4580 | CUUCCAAUAUCAAAAUUCA | 1081 | UGAAUUUUGAUAUUGGAAG | 1650 |
| NM_001735.2_4570-4588_s | 4570-4588 | AUCAAAAUUCAGAAAGUCU | 1082 | AGACUUUCUGAAUUUUGAU | 1651 |
| NM_001735.2_4581-4599_s | 4581-4599 | GAAAGUCUGUGAAGGAGCC | 1083 | GGCUCCUUCACAGACUUUC | 1652 |
| NM_001735.2_4591-4609_s | 4591-4609 | GAAGGAGCCGCGUGCAAGU | 1084 | ACUUGCACGCGGCUCCUUC | 1653 |
| NM_001735.2_4601-4619_s | 4601-4619 | CGUGCAAGUGUGUAGAAGC | 1085 | GCUUCUACACACUUGCACG | 1654 |
| NM_001735.2_4612-4630_s | 4612-4630 | GUAGAAGCUGAUUGUGGGC | 1086 | GCCCACAAUCAGCUUCUAC | 1655 |
| NM_001735.2_4619-4637_s | 4619-4637 | CUGAUUGUGGGCAAAUGCA | 1087 | UGCAUUUGCCCACAAUCAG | 1656 |
| NM_001735.2_4629-4647_s | 4629-4647 | GCAAAUGCAGGAAGAAUUG | 1088 | CAAUUCUUCCUGCAUUUGC | 1657 |
| NM_001735.2_4639-4657_s | 4639-4657 | GAAGAAUUGGAUCUGACAA | 1089 | UUGUCAGAUCCAAUUCUUC | 1658 |
| NM_001735.2_4651-4669_s | 4651-4669 | CUGACAAUCUCUGCAGAGA | 1090 | UCUCUGCAGAGAUUGUCAG | 1659 |
| NM_001735.2_4663-4681_s | 4663-4681 | GCAGAGACAAGAAAACAAA | 1091 | UUUGUUUUCUUGUCUCUGC | 1660 |
| NM_001735.2_4670-4688_s | 4670-4688 | CAAGAAAACAAACAGCAUG | 1092 | CAUGCUGUUUGUUUUCUUG | 1661 |
| NM_001735.2_4681-4699_s | 4681-4699 | ACAGCAUGUAAACCAGAGA | 1093 | UCUCUGGUUUACAUGCUGU | 1662 |
| NM_001735.2_4693-4711_s | 4693-4711 | CCAGAGAUUGCAUAUGCUU | 1094 | AAGCAUAUGCAAUCUCUGG | 1663 |
| NM_001735.2_4702-4720_s | 4702-4720 | GCAUAUGCUUAUAAAGUUA | 1095 | UAACUUUAUAAGCAUAUGC | 1664 |
| NM_001735.2_4710-4728_s | 4710-4728 | UUAUAAAGUUAGCAUCACA | 1096 | UGUGAUGCUAACUUUAUAA | 1665 |
| NM_001735.2_4722-4740_s | 4722-4740 | CAUCACAUCCAUCACUGUA | 1097 | UACAGUGAUGGAUGUGAUG | 1666 |
| NM_001735.2_4733-4751_s | 4733-4751 | UCACUGUAGAAAAUGUUUU | 1098 | AAAACAUUUUCUACAGUGA | 1667 |
| NM_001735.2_4740-4758_s | 4740-4758 | AGAAAAUGUUUUUGUCAAG | 1099 | CUUGACAAAAACAUUUUCU | 1668 |
| NM_001735.2_4750-4768_s | 4750-4768 | UUUGUCAAGUACAAGGCAA | 1100 | UUGCCUUGUACUUGACAAA | 1669 |
| NM_001735.2_4763-4781_s | 4763-4781 | AGGCAACCCUUCUGGAUAU | 1101 | AUAUCCAGAAGGGUUGCCU | 1670 |
| NM_001735.2_4770-4788_s | 4770-4788 | CCUUCUGGAUAUCUACAAA | 1102 | UUUGUAGAUAUCCAGAAGG | 1671 |
| NM_001735.2_4779-4797_s | 4779-4797 | UAUCUACAAAACUGGGGAA | 1103 | UUCCCCAGUUUUGUAGAUA | 1672 |
| NM_001735.2_4790-4808_s | 4790-4808 | CUGGGGAAGCUGUUGCUGA | 1104 | UCAGCAACAGCUUCCCCAG | 1673 |
| NM_001735.2_4799-4817_s | 4799-4817 | CUGUUGCUGAGAAAGACUC | 1105 | GAGUCUUUCUCAGCAACAG | 1674 |
| NM_001735.2_4813-4831_s | 4813-4831 | GACUCUGAGAUUACCUUCA | 1106 | UGAAGGUAAUCUCAGAGUC | 1675 |
| NM_001735.2_4819-4837_s | 4819-4837 | GAGAUUACCUUCAUUAAAA | 1107 | UUUUAAUGAAGGUAAUCUC | 1676 |
| NM_001735.2_4831-4849_s | 4831-4849 | AUUAAAAAGGUAACCUGUA | 1108 | UACAGGUUACCUUUUUAAU | 1677 |
| NM_001735.2_4841-4859_s | 4841-4859 | UAACCUGUACUAACGCUGA | 1109 | UCAGCGUUAGUACAGGUUA | 1678 |
| NM_001735.2_4850-4868_s | 4850-4868 | CUAACGCUGAGCUGGUAAA | 1110 | UUUACCAGCUCAGCGUUAG | 1679 |
| NM_001735.2_4863-4881_s | 4863-4881 | GGUAAAAGGAAGACAGUAC | 1111 | GUACUGUCUUCCUUUUACC | 1680 |
| NM_001735.2_4871-4889_s | 4871-4889 | GAAGACAGUACUUAAUUAU | 1112 | AUAAUUAAGUACUGUCUUC | 1681 |
| NM_001735.2_4881-4899_s | 4881-4899 | CUUAAUUAUGGGUAAAGAA | 1113 | UUCUUUACCCAUAAUUAAG | 1682 |
| NM_001735.2_4893-4911_s | 4893-4911 | UAAAGAAGCCCUCCAGAUA | 1114 | UAUCUGGAGGGCUUCUUUA | 1683 |
| NM_001735.2_4902-4920_s | 4902-4920 | CCUCCAGAUAAAAUACAAU | 1115 | AUUGUAUUUUAUCUGGAGG | 1684 |
| NM_001735.2_4912-4930_s | 4912-4930 | AAAUACAAUUUCAGUUUCA | 1116 | UGAAACUGAAAUUGUAUUU | 1685 |
| NM_001735.2_4923-4941_s | 4923-4941 | CAGUUUCAGGUACAUCUAC | 1117 | GUAGAUGUACCUGAAACUG | 1686 |
| NM_001735.2_4931-4949_s | 4931-4949 | GGUACAUCUACCCUUUAGA | 1118 | UCUAAAGGGUAGAUGUACC | 1687 |
| NM_001735.2_4942-4960_s | 4942-4960 | CCUUUAGAUUCCUUGACCU | 1119 | AGGUCAAGGAAUCUAAAGG | 1688 |
| NM_001735.2_4952-4970_s | 4952-4970 | CCUUGACCUGGAUUGAAUA | 1120 | UAUUCAAUCCAGGUCAAGG | 1689 |
| NM_001735.2_4961-4979_s | 4961-4979 | GGAUUGAAUACUGGCCUAG | 1121 | CUAGGCCAGUAUUCAAUCC | 1690 |
| NM_001735.2_4971-4989_s | 4971-4989 | CUGGCCUAGAGACACAACA | 1122 | UGUUGUGUCUCUAGGCCAG | 1691 |
| NM_001735.2_4979-4997_s | 4979-4997 | GAGACACAACAUGUUCAUC | 1123 | GAUGAACAUGUUGUGUCUC | 1692 |
| NM_001735.2_4991-5009_s | 4991-5009 | GUUCAUCGUGUCAAGCAUU | 1124 | AAUGCUUGACACGAUGAAC | 1693 |
| NM_001735.2_5000-5018_s | 5000-5018 | GUCAAGCAUUUUUAGCUAA | 1125 | UUAGCUAAAAAUGCUUGAC | 1694 |
| NM_001735.2_5013-5031_s | 5013-5031 | AGCUAAUUUAGAUGAAUUU | 1126 | AAAUUCAUCUAAAUUAGCU | 1695 |
| NM_001735.2_5022-5040_s | 5022-5040 | AGAUGAAUUUGCCGAAGAU | 1127 | AUCUUCGGCAAAUUCAUCU | 1696 |
| NM_001735.2_5033-5051_s | 5033-5051 | CCGAAGAUAUCUUUUUAAA | 1128 | UUUAAAAAGAUAUCUUCGG | 1697 |
| NM_001735.2_5043-5061_s | 5043-5061 | CUUUUUAAAUGGAUGCUAA | 1129 | UUAGCAUCCAUUUAAAAAG | 1698 |
| NM_001735.2_5053-5071_s | 5053-5071 | GGAUGCUAAAAUUCCUGAA | 1130 | UUCAGGAAUUUUAGCAUCC | 1699 |
| NM_001735.2_5059-5077_s | 5059-5077 | UAAAAUUCCUGAAGUUCAG | 1131 | CUGAACUUCAGGAAUUUUA | 1700 |
| NM_001735.2_5071-5089_s | 5071-5089 | AGUUCAGCUGCAUACAGUU | 1132 | AACUGUAUGCAGCUGAACU | 1701 |
| NM_001735.2_5080-5098_s | 5080-5098 | GCAUACAGUUUGCACUUAU | 1133 | AUAAGUGCAAACUGUAUGC | 1702 |
| NM_001735.2_5093-5111_s | 5093-5111 | ACUUAUGGACUCCUGUUGU | 1134 | ACAACAGGAGUCCAUAAGU | 1703 |
| NM_001735.2_5099-5117_s | 5099-5117 | GGACUCCUGUUGUUGAAGU | 1135 | ACUUCAACAACAGGAGUCC | 1704 |
| NM_001735.2_5109-5127_s | 5109-5127 | UGUUGAAGUUCGUUUUUUU | 1136 | AAAAAAACGAACUUCAACA | 1705 |
| NM_001735.2_5122-5140_s | 5122-5140 | UUUUUUGUUUUCUUCUUUU | 1137 | AAAAGAAGAAAACAAAAAA | 1706 |
| NM_001735.2_5132-5150_s | 5132-5150 | UCUUCUUUUUUUAAACAUU | 1138 | AAUGUUUAAAAAAAGAAGA | 1707 |
| NM_001735.2_5139-5157_s | 5139-5157 | UUUUUAAACAUUCAUAGCU | 1139 | AGCUAUGAAUGUUUAAAAA | 1708 |
| NM_001735.2_5152-5170_s | 5152-5170 | AUAGCUGGUCUUAUUUGUA | 1140 | UACAAAUAAGACCAGCUAU | 1709 |
| NM_001735.2_5159-5177_s | 5159-5177 | GUCUUAUUUGUAAAGCUCA | 1141 | UGAGCUUUACAAAUAAGAC | 1710 |
| NM_001735.2_5170-5188_s | 5170-5188 | AAAGCUCACUUUACUUAGA | 1142 | UCUAAGUAAAGUGAGCUUU | 1711 |
| NM_001735.2_5182-5200_s | 5182-5200 | ACUUAGAAUUAGUGGCACU | 1143 | AGUGCCACUAAUUCUAAGU | 1712 |
| NM_001735.2_5192-5210_s | 5192-5210 | AGUGGCACUUGCUUUUAUU | 1144 | AAUAAAAGCAAGUGCCACU | 1713 |
| NM_001735.2_5202-5220_s | 5202-5220 | GCUUUUAUUAGAGAAUGAU | 1145 | AUCAUUCUCUAAUAAAAGC | 1714 |
| NM_001735.2_5212-5230_s | 5212-5230 | GAGAAUGAUUUCAAAUGCU | 1146 | AGCAUUUGAAAUCAUUCUC | 1715 |
| NM_001735.2_5220-5238_s | 5220-5238 | UUUCAAAUGCUGUAACUUU | 1147 | AAAGUUACAGCAUUUGAAA | 1716 |
| NM_001735.2_5231-5249_s | 5231-5249 | GUAACUUUCUGAAAUAACA | 1148 | UGUUAUUUCAGAAAGUUAC | 1717 |
| NM_001735.2_5241-5259_s | 5241-5259 | GAAAUAACAUGGCCUUGGA | 1149 | UCCAAGGCCAUGUUAUUUC | 1718 |
| NM_001735.2_5253-5271_s | 5253-5271 | CCUUGGAGGGCAUGAAGAC | 1150 | GUCUUCAUGCCCUCCAAGG | 1719 |
| NM_001735.2_5259-5277_s | 5259-5277 | AGGGCAUGAAGACAGAUAC | 1151 | GUAUCUGUCUUCAUGCCCU | 1720 |
| NM_001735.2_5273-5291_s | 5273-5291 | GAUACUCCUCCAAGGUUAU | 1152 | AUAACCUUGGAGGAGUAUC | 1721 |
| NM_001735.2_5279-5297_s | 5279-5297 | CCUCCAAGGUUAUUGGACA | 1153 | UGUCCAAUAACCUUGGAGG | 1722 |
| NM_001735.2_5293-5311_s | 5293-5311 | GGACACCGGAAACAAUAAA | 1154 | UUUAUUGUUUCCGGUGUCC | 1723 |
| NM_001735.2_5301-5319_s | 5301-5319 | GAAACAAUAAAUUGGAACA | 1155 | UGUUCCAAUUUAUUGUUUC | 1724 |
| NM_001735.2_5311-5329_s | 5311-5329 | AUUGGAACACCUCCUCAAA | 1156 | UUUGAGGAGGUGUUCCAAU | 1725 |
| NM_001735.2_5322-5340_s | 5322-5340 | UCCUCAAACCUACCACUCA | 1157 | UGAGUGGUAGGUUUGAGGA | 1726 |
| NM_001735.2_5331-5349_s | 5331-5349 | CUACCACUCAGGAAUGUUU | 1158 | AAACAUUCCUGAGUGGUAG | 1727 |
| NM_001735.2_5343-5361_s | 5343-5361 | AAUGUUUGCUGGGGCCGAA | 1159 | UUCGGCCCCAGCAAACAUU | 1728 |
| NM_001735.2_5349-5367_s | 5349-5367 | UGCUGGGGCCGAAAGAACA | 1160 | UGUUCUUUCGGCCCCAGCA | 1729 |
| NM_001735.2_5360-5378_s | 5360-5378 | AAAGAACAGUCCAUUGAAA | 1161 | UUUCAAUGGACUGUUCUUU | 1730 |
| NM_001735.2_5371-5389_s | 5371-5389 | CAUUGAAAGGGAGUAUUAC | 1162 | GUAAUACUCCCUUUCAAUG | 1731 |
| NM_001735.2_5380-5398_s | 5380-5398 | GGAGUAUUACAAAAACAUG | 1163 | CAUGUUUUUGUAAUACUCC | 1732 |
| NM_001735.2_5391-5409_s | 5391-5409 | AAAACAUGGCCUUUGCUUG | 1164 | CAAGCAAAGGCCAUGUUUU | 1733 |
| NM_001735.2_5399-5417_s | 5399-5417 | GCCUUUGCUUGAAAGAAAA | 1165 | UUUUCUUUCAAGCAAAGGC | 1734 |
| NM_001735.2_5409-5427_s | 5409-5427 | GAAAGAAAAUACCAAGGAA | 1166 | UUCCUUGGUAUUUUCUUUC | 1735 |
| NM_001735.2_5420-5438_s | 5420-5438 | CCAAGGAACAGGAAACUGA | 1167 | UCAGUUUCCUGUUCCUUGG | 1736 |
| NM_001735.2_5433-5451_s | 5433-5451 | AACUGAUCAUUAAAGCCUG | 1168 | CAGGCUUUAAUGAUCAGUU | 1737 |
| NM_001735.2_5441-5459_s | 5441-5459 | AUUAAAGCCUGAGUUUGCU | 1169 | AGCAAACUCAGGCUUUAAU | 1738 |

### Example 5: In Vivo C5 Silencing

[0723] Groups of three female cynomolgus macaques were treated with C5-siRNA AD-58641 subcutaneously in the scapular and mid-dorsal areas of the back at 2.5 mg/kg or 5 mg/kg doses or a vehicle control. Two rounds of dosing were administered with eight doses in each round given every third day. Serum C5 was collected and evaluated using an ELISA assay specific for C5 detection (Abcam) at the indicated time points (FIG. 13). C5 levels were normalized to the average of three pre-dose samples. Samples collected prior to dosing, and on day 23 (24 hours after the last dose administered in the first round of treatment) were analyzed by complete serum chemistry, hematology and coagulation panels.

[0724] Analysis of serum C5 protein levels relative to pre-treatment serum C5 protein levels demonstrated that the 5 mg/kg AD-58641 dosing regimen reduced serum C5 protein levels up to 98% (FIG. 12). The average serum C5 levels were reduced by 97% at the nadir, indicating that the majority of circulating C5 is hepatic in origin. There was potent, dose-dependent and durable knock-down of serum C5 protein levels with subcutaneous administration of AD-58641. No changes in hematology, serum chemistry or coagulation parameters were identified 24 hours after the first round of dosing.

[0725] Serum hemolytic activity was also analyzed using a sensitized sheep erythrocyte assay to measure classical pathway activity. The percent hemolysis was calculated relative to maximal hemolysis and to background hemolysis in control samples. Mean hemolysis values +/− the SEM for three animals were calculated and analyzed (FIG. 13). Hemolysis was reduced up to 94% in the 5 mg/kg dosing regimen with an average inhibition of 92% at the nadir. The reduction in hemolysis was maintained for greater than two weeks following the last dose.

### Example 6: In Vitro Screening of Additional siRNAs

[0726] The C5 sense and antisense strand sequences shown in Table 20 were modified at the 3′-terminus with a short sequence of deoxy-thymine nucleotides (dT) (Table 21). The in vitro efficacy of duplexes comprising the sense and antisense sequences listed in Table 21 was determined using the following methods.

### Cell Culture and Transfections

[0727] Hep3B cells (ATCC, Manassas, Va.) were grown to near confluence at 37° C. in an atmosphere of 5% CO₂ in EMEM (ATCC) supplemented with 10% FBS, before being released from the plate by trypsinization. Transfection was carried out by adding 5 μl of Opti-MEM plus 0.1 μl of Lipofectamine RNAiMax per well (Invitrogen, Carlsbad Calif. cat #13778-150) to 50 of siRNA duplexes per well into a 384-well plate and incubated at room temperature for 15 minutes. 40 μl of complete growth media containing ˜5×10³ Hep3B cells were then added to the siRNA mixture. Cells were incubated for 24 hours prior to RNA purification. Experiments were performed at 10 nM final duplex concentration.

Total RNA Isolation Using DYNABEADS mRNA Isolation Kit (Invitrogen, Part #: 610-12)

[0728] RNA isolation was performed using a semi-automated process of a Biotek EL 405 washer. Briefly, cells were lysed in 750 of Lysis/Binding Buffer containing 2 ul of Dynabeads, then mixed for 10 minutes on setting 7 of an electromagnetic shaker (Union Scientific). Magnetic beads were captured using magnetic stand and the supernatant was removed. After removing supernatant, magnetic beads were washed with 90 μl Wash Buffer A, followed by 90 μl of Wash buffer B. Beads were then washed twice with 100 ul of Elution buffer which was then aspirated and cDNA generated directly on bead bound RNA in the 384 well plate.

cDNA Synthesis Using ABI High Capacity cDNA Reverse Transcription Kit (Applied Biosystems, Foster City, Calif., Cat #4368813)

[0729] A master mix of 20 μl 10× Buffer, 0.8 μl 25× dNTPs, 20 Random primers, 10 Reverse Transcriptase, 10 RNase inhibitor and 3.20 of H₂O per reaction were added directly to the bead bound RNA in the 384 well plates used for RNA isolation. Plates were then shaken on an electromagnetic shaker for 10 minutes and then placed in a 37° C. incubator for 2 hours. Following this incubation, plates were place on a shake in an 80° C. incubator for 7 minutes to inactivate the enzyme and elute the RNA/cDNA from the beads.

### Real Time PCR

[0730] 2 μl of cDNA were added to a master mix containing 0.5 μl GAPDH TaqMan Probe (Applied Biosystems Cat #4326317E), 0.5 μl C5 TaqMan probe (Applied Biosystems cat # Hs00156197_M1) and 5 μl Lightcycler 480 probe master mix (Roche Cat #04887301001) per well in a 384 well plates (Roche cat #04887301001). Real time PCR was done in a Roche LC480 Real Time PCR system (Roche). Each duplex was tested in at least two independent transfections and each transfection was assayed in duplicate.

[0731] To calculate relative fold change, real time data were analyzed using the ΔΔCt method and normalized to assays performed with cells transfected with 10 nM AD-1955, or mock transfected cells.

[0732] Table 22 shows the results of a single dose screen in Hep3B cells transfected with the indicated dT modified iRNAs. Data are expressed as percent of message remaining relative to untreated cells.

TABLE 21
dT Modified C5 iRNAs

| | | SEQ ID | Position in | | SEQ ID |
|---|---|---|---|---|---|
| Duplex ID | Sense Sequence | NO: | NM_001735.2 | Antisense Sequence | NO: |
| AD-61779.2 | UAUCCGUGGUUUCCUGCUAdTdT | 1739 | 3-21 | UAGCAGGAAACCACGGAUAdTdT | 2306 |
| AD-61785.2 | GGUUUCCUGCUACCUCCAAdTdT | 1740 | 10-28 | UUGGAGGUAGCAGGAAACCdTdT | 2307 |
| AD-61791.2 | CCUCCAACCAUGGGCCUUUdTdT | 1741 | 22-40 | AAAGGCCCAUGGUUGGAGGdTdT | 2308 |
| AD-61797.2 | GGGCCUUUUGGGAAUACUUdTdT | 1742 | 33-51 | AAGUAUUCCCAAAAGGCCCdTdT | 2309 |
| AD-61803.2 | GGAAUACUUUGUUUUUUAAdTdT | 1743 | 43-61 | UUAAAAAACAAAGUAUUCCdTdT | 2310 |
| AD-61809.2 | CUUUGUUUUUUAAUCUUCCdTdT | 1744 | 49-67 | GGAAGAUUAAAAAACAAAGdTdT | 2311 |
| AD-61815.2 | CUUCCUGGGGAAAACCUGGdTdT | 1745 | 63-81 | CCAGGUUUUCCCCAGGAAGdTdT | 2312 |
| AD-61821.2 | GGAAAACCUGGGGACAGGAdTdT | 1746 | 71-89 | UCCUGUCCCCAGGUUUUCCdTdT | 2313 |
| AD-61780.2 | GGGACAGGAGCAAACAUAUdTdT | 1747 | 81-99 | AUAUGUUUGCUCCUGUCCCdTdT | 2314 |
| AD-61786.2 | CAAACAUAUGUCAUUUCAGdTdT | 1748 | 91-109 | CUGAAAUGACAUAUGUUUGdTdT | 2315 |
| AD-61792.2 | CAUUUCAGCACCAAAAAUAdTdT | 1749 | 102-120 | UAUUUUUGGUGCUGAAAUGdTdT | 2316 |
| AD-61798.2 | GCACCAAAAAUAUUCCGUGdTdT | 1750 | 109-127 | CACGGAAUAUUUUUGGUGCdTdT | 2317 |
| AD-61804.2 | CCGUGUUGGAGCAUCUGAAdTdT | 1751 | 123-141 | UUCAGAUGCUCCAACACGGdTdT | 2318 |
| AD-61810.2 | GGAGCAUCUGAAAAUAUUGdTdT | 1752 | 130-148 | CAAUAUUUUCAGAUGCUCCdTdT | 2319 |
| AD-61816.2 | GAAAAUAUUGUGAUUCAAGdTdT | 1753 | 139-157 | CUUGAAUCACAAUAUUUUCdTdT | 2320 |
| AD-61822.2 | GAUUCAAGUUUAUGGAUACdTdT | 1754 | 150-168 | GUAUCCAUAAACUUGAAUCdTdT | 2321 |
| AD-61781.2 | GGAUACACUGAAGCAUUUGdTdT | 1755 | 163-181 | CAAAUGCUUCAGUGUAUCCdTdT | 2322 |
| AD-61787.2 | GAAGCAUUUGAUGCAACAAdTdT | 1756 | 172-190 | UUGUUGCAUCAAAUGCUUCdTdT | 2323 |
| AD-61793.2 | UGCAACAAUCUCUAUUAAAdTdT | 1757 | 183-201 | UUUAAUAGAGAUUGUUGCAdTdT | 2324 |
| AD-61799.2 | AAUCUCUAUUAAAAGUUAUdTdT | 1758 | 189-207 | AUAACUUUUAAUAGAGAUUdTdT | 2325 |
| AD-61805.2 | AAGUUAUCCUGAUAAAAAAdTdT | 1759 | 201-219 | UUUUUUAUCAGGAUAACUUdTdT | 2326 |
| AD-61811.2 | CUGAUAAAAAAUUUAGUUAdTdT | 1760 | 209-227 | UAACUAAAUUUUUUAUCAGdTdT | 2327 |
| AD-61817.2 | UUAGUUACUCCUCAGGCCAdTdT | 1761 | 221-239 | UGGCCUGAGGAGUAACUAAdTdT | 2328 |
| AD-61823.2 | CCUCAGGCCAUGUUCAUUUdTdT | 1762 | 230-248 | AAAUGAACAUGGCCUGAGGdTdT | 2329 |
| AD-61782.2 | UUCAUUUAUCCUCAGAGAAdTdT | 1763 | 242-260 | UUCUCUGAGGAUAAAUGAAdTdT | 2330 |
| AD-61788.2 | CUCAGAGAAUAAAUUCCAAdTdT | 1764 | 252-270 | UUGGAAUUUAUUCUCUGAGdTdT | 2331 |
| AD-61794.2 | AAUAAAUUCCAAAACUCUGdTdT | 1765 | 259-277 | CAGAGUUUUGGAAUUUAUUdTdT | 2332 |
| AD-61800.2 | CUCUGCAAUCUUAACAAUAdTdT | 1766 | 273-291 | UAUUGUUAAGAUUGCAGAGdTdT | 2333 |
| AD-61806.2 | CUUAACAAUACAACCAAAAdTdT | 1767 | 282-300 | UUUUGGUUGUAUUGUUAAGdTdT | 2334 |
| AD-61812.2 | CAACCAAAACAAUUGCCUGdTdT | 1768 | 292-310 | CAGGCAAUUGUUUUGGUUGdTdT | 2335 |
| AD-61818.2 | CAAUUGCCUGGAGGACAAAdTdT | 1769 | 301-319 | UUUGUCCUCCAGGCAAUUGdTdT | 2336 |
| AD-61824.2 | GGACAAAACCCAGUUUCUUdTdT | 1770 | 313-331 | AAGAAACUGGGUUUUGUCCdTdT | 2337 |
| AD-61783.2 | CCAGUUUCUUAUGUGUAUUdTdT | 1771 | 322-340 | AAUACACAUAAGAAACUGGdTdT | 2338 |
| AD-61789.2 | AUGUGUAUUUGGAAGUUGUdTdT | 1772 | 332-350 | ACAACUUCCAAAUACACAUdTdT | 2339 |
| AD-61795.2 | GGAAGUUGUAUCAAAGCAUdTdT | 1773 | 342-360 | AUGCUUUGAUACAACUUCCdTdT | 2340 |
| AD-61801.2 | GUAUCAAAGCAUUUUUCAAdTdT | 1774 | 349-367 | UUGAAAAAUGCUUUGAUACdTdT | 2341 |
| AD-61807.2 | UUUUCAAAAUCAAAAAGAAdTdT | 1775 | 361-379 | UUCUUUUUGAUUUUGAAAAdTdT | 2342 |
| AD-61813.2 | CAAAAAGAAUGCCAAUAACdTdT | 1776 | 371-389 | GUUAUUGGCAUUCUUUUUGdTdT | 2343 |
| AD-61819.2 | GCCAAUAACCUAUGACAAUdTdT | 1777 | 381-399 | AUUGUCAUAGGUUAUUGGCdTdT | 2344 |
| AD-61825.2 | CCUAUGACAAUGGAUUUCUdTdT | 1778 | 389-407 | AGAAAUCCAUUGUCAUAGGdTdT | 2345 |
| AD-61784.2 | UGGAUUUCUCUUCAUUCAUdTdT | 1779 | 399-417 | AUGAAUGAAGAGAAAUCCAdTdT | 2346 |
| AD-61790.2 | CAUUCAUACAGACAAACCUdTdT | 1780 | 411-429 | AGGUUUGUCUGUAUGAAUGdTdT | 2347 |
| AD-61796.2 | CAGACAAACCUGUUUAUACdTdT | 1781 | 419-437 | GUAUAAACAGGUUUGUCUGdTdT | 2348 |
| AD-61802.2 | GUUUAUACUCCAGACCAGUdTdT | 1782 | 430-448 | ACUGGUCUGGAGUAUAAACdTdT | 2349 |
| AD-61808.2 | AGACCAGUCAGUAAAAGUUdTdT | 1783 | 441-459 | AACUUUUACUGACUGGUCUdTdT | 2350 |
| AD-61814.2 | AGUAAAAGUUAGAGUUUAUdTdT | 1784 | 450-468 | AUAAACUCUAACUUUUACUdTdT | 2351 |
| AD-61820.2 | AGAGUUUAUUCGUUGAAUGdTdT | 1785 | 460-478 | CAUUCAACGAAUAAACUCUdTdT | 2352 |
| AD-61826.2 | CGUUGAAUGACGACUUGAAdTdT | 1786 | 470-488 | UUCAAGUCGUCAUUCAACGdTdT | 2353 |
| AD-61832.2 | CUUGAAGCCAGCCAAAAGAdTdT | 1787 | 483-501 | UCUUUUGGCUGGCUUCAAGdTdT | 2354 |
| AD-61838.2 | CCAGCCAAAAGAGAAACUGdTdT | 1788 | 490-508 | CAGUUUCUCUUUUGGCUGGdTdT | 2355 |
| AD-61844.2 | AAACUGUCUUAACUUUCAUdTdT | 1789 | 503-521 | AUGAAAGUUAAGACAGUUUdTdT | 2356 |
| AD-61850.2 | AACUUUCAUAGAUCCUGAAdTdT | 1790 | 513-531 | UUCAGGAUCUAUGAAAGUUdTdT | 2357 |
| AD-61856.2 | CAUAGAUCCUGAAGGAUCAdTdT | 1791 | 519-537 | UGAUCCUUCAGGAUCUAUGdTdT | 2358 |
| AD-61862.2 | GAAGGAUCAGAAGUUGACAdTdT | 1792 | 529-547 | UGUCAACUUCUGAUCCUUCdTdT | 2359 |
| AD-61868.2 | UGACAUGGUAGAAGAAAUUdTdT | 1793 | 543-561 | AAUUUCUUCUACCAUGUCAdTdT | 2360 |
| AD-61827.2 | GAAGAAAUUGAUCAUAUUGdTdT | 1794 | 553-571 | CAAUAUGAUCAAUUUCUUCdTdT | 2361 |
| AD-61833.2 | GAUCAUAUUGGAAUUAUCUdTdT | 1795 | 562-580 | AGAUAAUUCCAAUAUGAUCdTdT | 2362 |
| AD-61839.2 | GGAAUUAUCUCUUUUCCUGdTdT | 1796 | 571-589 | CAGGAAAAGAGAUAAUUCCdTdT | 2363 |
| AD-61845.2 | CUCUUUUCCUGACUUCAAGdTdT | 1797 | 579-597 | CUUGAAGUCAGGAAAAGAGdTdT | 2364 |
| AD-61851.2 | ACUUCAAGAUUCCGUCUAAdTdT | 1798 | 590-608 | UUAGACGGAAUCUUGAAGUdTdT | 2365 |
| AD-61857.2 | CCGUCUAAUCCUAGAUAUGdTdT | 1799 | 601-619 | CAUAUCUAGGAUUAGACGGdTdT | 2366 |
| AD-61863.2 | CCUAGAUAUGGUAUGUGGAdTdT | 1800 | 610-628 | UCCACAUACCAUAUCUAGGdTdT | 2367 |
| AD-61869.2 | UGUGGACGAUCAAGGCUAAdTdT | 1801 | 623-641 | UUAGCCUUGAUCGUCCACAdTdT | 2368 |
| AD-61828.2 | CGAUCAAGGCUAAAUAUAAdTdT | 1802 | 629-647 | UUAUAUUUAGCCUUGAUCGdTdT | 2369 |
| AD-61834.2 | AUAUAAAGAGGACUUUUCAdTdT | 1803 | 642-660 | UGAAAAGUCCUCUUUAUAUdTdT | 2370 |
| AD-61840.2 | GAGGACUUUUCAACAACUGdTdT | 1804 | 649-667 | CAGUUGUUGAAAAGUCCUCdTdT | 2371 |
| AD-61846.2 | CAACUGGAACCGCAUAUUUdTdT | 1805 | 662-680 | AAAUAUGCGGUUCCAGUUGdTdT | 2372 |
| AD-61852.2 | CGCAUAUUUUGAAGUUAAAdTdT | 1806 | 672-690 | UUUAACUUCAAAAUAUGCGdTdT | 2373 |
| AD-61858.2 | AAGUUAAAGAAUAUGUCUUdTdT | 1807 | 683-701 | AAGACAUAUUCUUUAACUUdTdT | 2374 |
| AD-61864.2 | GAAUAUGUCUUGCCACAUUdTdT | 1808 | 691-709 | AAUGUGGCAAGACAUAUUCdTdT | 2375 |
| AD-61870.2 | CCACAUUUUUCUGUCUCAAdTdT | 1809 | 703-721 | UUGAGACAGAAAAAUGUGGdTdT | 2376 |
| AD-61829.2 | CUGUCUCAAUCGAGCCAGAdTdT | 1810 | 713-731 | UCUGGCUCGAUUGAGACAGdTdT | 2377 |
| AD-61835.2 | CAAUCGAGCCAGAAUAUAAdTdT | 1811 | 719-737 | UUAUAUUCUGGCUCGAUUGdTdT | 2378 |
| AD-61841.2 | GAAUAUAAUUUCAUUGGUUdTdT | 1812 | 730-748 | AACCAAUGAAAUUAUAUUCdTdT | 2379 |
| AD-61847.2 | AUUGGUUACAAGAACUUUAdTdT | 1813 | 742-760 | UAAAGUUCUUGUAACCAAUdTdT | 2380 |
| AD-61853.2 | AGAACUUUAAGAAUUUUGAdTdT | 1814 | 752-770 | UCAAAAUUCUUAAAGUUCUdTdT | 2381 |
| AD-61859.2 | GAAUUUUGAAAUUACUAUAdTdT | 1815 | 762-780 | UAUAGUAAUUUCAAAAUUCdTdT | 2382 |
| AD-61865.2 | GAAAUUACUAUAAAAGCAAdTdT | 1816 | 769-787 | UUGCUUUUAUAGUAAUUUCdTdT | 2383 |
| AD-61871.2 | AAAGCAAGAUAUUUUUAUAdTdT | 1817 | 781-799 | UAUAAAAAUAUCUUGCUUUdTdT | 2384 |
| AD-61830.2 | AUAUUUUUAUAAUAAAGUAdTdT | 1818 | 789-807 | UACUUUAUUAUAAAAAUAUdTdT | 2385 |
| AD-61836.2 | AAGUAGUCACUGAGGCUGAdTdT | 1819 | 803-821 | UCAGCCUCAGUGACUACUUdTdT | 2386 |
| AD-61842.2 | CACUGAGGCUGACGUUUAUdTdT | 1820 | 810-828 | AUAAACGUCAGCCUCAGUGdTdT | 2387 |
| AD-61848.2 | CGUUUAUAUCACAUUUGGAdTdT | 1821 | 822-840 | UCCAAAUGUGAUAUAAACGdTdT | 2388 |
| AD-61854.2 | CACAUUUGGAAUAAGAGAAdTdT | 1822 | 831-849 | UUCUCUUAUUCCAAAUGUGdTdT | 2389 |
| AD-61860.2 | AAUAAGAGAAGACUUAAAAdTdT | 1823 | 840-858 | UUUUAAGUCUUCUCUUAUUdTdT | 2390 |
| AD-61866.2 | CUUAAAAGAUGAUCAAAAAdTdT | 1824 | 852-870 | UUUUUGAUCAUCUUUUAAGdTdT | 2391 |
| AD-61872.2 | GAUGAUCAAAAAGAAAUGAdTdT | 1825 | 859-877 | UCAUUUCUUUUUGAUCAUCdTdT | 2392 |
| AD-61831.2 | AAAUGAUGCAAACAGCAAUdTdT | 1826 | 872-890 | AUUGCUGUUUGCAUCAUUUdTdT | 2393 |
| AD-61837.2 | ACAGCAAUGCAAAACACAAdTdT | 1827 | 883-901 | UUGUGUUUUGCAUUGCUGUdTdT | 2394 |
| AD-61843.2 | AAAACACAAUGUUGAUAAAdTdT | 1828 | 893-911 | UUUAUCAACAUUGUGUUUUdTdT | 2395 |
| AD-61849.2 | CAAUGUUGAUAAAUGGAAUdTdT | 1829 | 899-917 | AUUCCAUUUAUCAACAUUGdTdT | 2396 |
| AD-61855.2 | GGAAUUGCUCAAGUCACAUdTdT | 1830 | 913-931 | AUGUGACUUGAGCAAUUCCdTdT | 2397 |
| AD-61861.2 | GCUCAAGUCACAUUUGAUUdTdT | 1831 | 919-937 | AAUCAAAUGUGACUUGAGCdTdT | 2398 |
| AD-61867.2 | AUUUGAUUCUGAAACAGCAdTdT | 1832 | 930-948 | UGCUGUUUCAGAAUCAAAUdTdT | 2399 |
| AD-62062.1 | UGAAACAGCAGUCAAAGAAdTdT | 1833 | 939-957 | UUCUUUGACUGCUGUUUCAdTdT | 2400 |
| AD-62068.1 | CAAAGAACUGUCAUACUACdTdT | 1834 | 951-969 | GUAGUAUGACAGUUCUUUGdTdT | 2401 |
| AD-62074.1 | CAUACUACAGUUUAGAAGAdTdT | 1835 | 962-980 | UCUUCUAAACUGUAGUAUGdTdT | 2402 |
| AD-62080.1 | CAGUUUAGAAGAUUUAAACdTdT | 1836 | 969-987 | GUUUAAAUCUUCUAAACUGdTdT | 2403 |
| AD-62086.1 | UAAACAACAAGUACCUUUAdTdT | 1837 | 983-1001 | UAAAGGUACUUGUUGUUUAdTdT | 2404 |
| AD-62092.1 | CAAGUACCUUUAUAUUGCUdTdT | 1838 | 990-1008 | AGCAAUAUAAAGGUACUUGdTdT | 2405 |
| AD-62098.1 | UAUUGCUGUAACAGUCAUAdTdT | 1839 | 1002-1020 | UAUGACUGUUACAGCAAUAdTdT | 2406 |
| AD-62104.1 | AACAGUCAUAGAGUCUACAdTdT | 1840 | 1011-1029 | UGUAGACUCUAUGACUGUUdTdT | 2407 |
| AD-62063.1 | AGAGUCUACAGGUGGAUUUdTdT | 1841 | 1020-1038 | AAAUCCACCUGUAGACUCUdTdT | 2408 |
| AD-62069.1 | GGAUUUUCUGAAGAGGCAGdTdT | 1842 | 1033-1051 | CUGCCUCUUCAGAAAAUCCdTdT | 2409 |
| AD-62075.1 | GAAGAGGCAGAAAUACCUGdTdT | 1843 | 1042-1060 | CAGGUAUUUCUGCCUCUUCdTdT | 2410 |
| AD-62081.1 | AGAAAUACCUGGCAUCAAAdTdT | 1844 | 1050-1068 | UUUGAUGCCAGGUAUUUCUdTdT | 2411 |
| AD-62087.1 | GCAUCAAAUAUGUCCUCUCdTdT | 1845 | 1061-1079 | GAGAGGACAUAUUUGAUGCdTdT | 2412 |
| AD-62093.1 | UGUCCUCUCUCCCUACAAAdTdT | 1846 | 1071-1089 | UUUGUAGGGAGAGAGGACAdTdT | 2413 |
| AD-62099.1 | GAAUUUGGUUGCUACUCCUdTdT | 1847 | 1092-1110 | AGGAGUAGCAACCAAAUUCdTdT | 2414 |
| AD-62105.1 | GCUACUCCUCUUUUCCUGAdTdT | 1848 | 1102-1120 | UCAGGAAAAGAGGAGUAGCdTdT | 2415 |
| AD-62064.1 | CUCUUUUCCUGAAGCCUGGdTdT | 1849 | 1109-1127 | CCAGGCUUCAGGAAAAGAGdTdT | 2416 |
| AD-62070.1 | CCUGGGAUUCCAUAUCCCAdTdT | 1850 | 1123-1141 | UGGGAUAUGGAAUCCCAGGdTdT | 2417 |
| AD-62076.1 | CAUAUCCCAUCAAGGUGCAdTdT | 1851 | 1133-1151 | UGCACCUUGAUGGGAUAUGdTdT | 2418 |
| AD-62082.1 | CCAUCAAGGUGCAGGUUAAdTdT | 1852 | 1139-1157 | UUAACCUGCACCUUGAUGGdTdT | 2419 |
| AD-62088.1 | CAGGUUAAAGAUUCGCUUGdTdT | 1853 | 1150-1168 | CAAGCGAAUCUUUAACCUGdTdT | 2420 |
| AD-62094.1 | UUCGCUUGACCAGUUGGUAdTdT | 1854 | 1161-1179 | UACCAACUGGUCAAGCGAAdTdT | 2421 |
| AD-62100.1 | CCAGUUGGUAGGAGGAGUCdTdT | 1855 | 1170-1188 | GACUCCUCCUACCAACUGGdTdT | 2422 |
| AD-62106.1 | GGAGGAGUCCCAGUAACACdTdT | 1856 | 1180-1198 | GUGUUACUGGGACUCCUCCdTdT | 2423 |
| AD-62065.1 | CAGUAACACUGAAUGCACAdTdT | 1857 | 1190-1208 | UGUGCAUUCAGUGUUACUGdTdT | 2424 |
| AD-62071.1 | GAAUGCACAAACAAUUGAUdTdT | 1858 | 1200-1218 | AUCAAUUGUUUGUGCAUUCdTdT | 2425 |
| AD-62077.1 | AACAAUUGAUGUAAACCAAdTdT | 1859 | 1209-1227 | UUGGUUUACAUCAAUUGUUdTdT | 2426 |
| AD-62083.1 | UAAACCAAGAGACAUCUGAdTdT | 1860 | 1220-1238 | UCAGAUGUCUCUUGGUUUAdTdT | 2427 |
| AD-62089.1 | CAUCUGACUUGGAUCCAAGdTdT | 1861 | 1232-1250 | CUUGGAUCCAAGUCAGAUGdTdT | 2428 |
| AD-62095.1 | GAUCCAAGCAAAAGUGUAAdTdT | 1862 | 1243-1261 | UUACACUUUUGCUUGGAUCdTdT | 2429 |
| AD-62101.1 | CAAAAGUGUAACACGUGUUdTdT | 1863 | 1251-1269 | AACACGUGUUACACUUUUGdTdT | 2430 |
| AD-62107.1 | AACACGUGUUGAUGAUGGAdTdT | 1864 | 1260-1278 | UCCAUCAUCAACACGUGUUdTdT | 2431 |
| AD-62066.1 | UGAUGGAGUAGCUUCCUUUdTdT | 1865 | 1272-1290 | AAAGGAAGCUACUCCAUCAdTdT | 2432 |
| AD-62072.1 | GUAGCUUCCUUUGUGCUUAdTdT | 1866 | 1279-1297 | UAAGCACAAAGGAAGCUACdTdT | 2433 |
| AD-62078.1 | GCUUAAUCUCCCAUCUGGAdTdT | 1867 | 1293-1311 | UCCAGAUGGGAGAUUAAGCdTdT | 2434 |
| AD-62084.1 | CCAUCUGGAGUGACGGUGCdTdT | 1868 | 1303-1321 | GCACCGUCACUCCAGAUGGdTdT | 2435 |
| AD-62090.1 | UGACGGUGCUGGAGUUUAAdTdT | 1869 | 1313-1331 | UUAAACUCCAGCACCGUCAdTdT | 2436 |
| AD-62096.1 | GCUGGAGUUUAAUGUCAAAdTdT | 1870 | 1320-1338 | UUUGACAUUAAACUCCAGCdTdT | 2437 |
| AD-62102.1 | UGUCAAAACUGAUGCUCCAdTdT | 1871 | 1332-1350 | UGGAGCAUCAGUUUUGACAdTdT | 2438 |
| AD-62108.1 | GAUGCUCCAGAUCUUCCAGdTdT | 1872 | 1342-1360 | CUGGAAGAUCUGGAGCAUCdTdT | 2439 |
| AD-62067.1 | CAGAUCUUCCAGAAGAAAAdTdT | 1873 | 1349-1367 | UUUUCUUCUGGAAGAUCUGdTdT | 2440 |
| AD-62073.1 | AGAAAAUCAGGCCAGGGAAdTdT | 1874 | 1362-1380 | UUCCCUGGCCUGAUUUUCUdTdT | 2441 |
| AD-62079.1 | GGCCAGGGAAGGUUACCGAdTdT | 1875 | 1371-1389 | UCGGUAACCUUCCCUGGCCdTdT | 2442 |
| AD-62085.1 | GUUACCGAGCAAUAGCAUAdTdT | 1876 | 1382-1400 | UAUGCUAUUGCUCGGUAACdTdT | 2443 |
| AD-62091.1 | AUAGCAUACUCAUCUCUCAdTdT | 1877 | 1393-1411 | UGAGAGAUGAGUAUGCUAUdTdT | 2444 |
| AD-62097.1 | UACUCAUCUCUCAGCCAAAdTdT | 1878 | 1399-1417 | UUUGGCUGAGAGAUGAGUAdTdT | 2445 |
| AD-62103.1 | GCCAAAGUUACCUUUAUAUdTdT | 1879 | 1412-1430 | AUAUAAAGGUAACUUUGGCdTdT | 2446 |
| AD-62109.1 | CCUUUAUAUUGAUUGGACUdTdT | 1880 | 1422-1440 | AGUCCAAUCAAUAUAAAGGdTdT | 2447 |
| AD-62115.1 | GAUUGGACUGAUAACCAUAdTdT | 1881 | 1432-1450 | UAUGGUUAUCAGUCCAAUCdTdT | 2448 |
| AD-62121.1 | CUGAUAACCAUAAGGCUUUdTdT | 1882 | 1439-1457 | AAAGCCUUAUGGUUAUCAGdTdT | 2449 |
| AD-62127.1 | AGGCUUUGCUAGUGGGAGAdTdT | 1883 | 1451-1469 | UCUCCCACUAGCAAAGCCUdTdT | 2450 |
| AD-62133.1 | GUGGGAGAACAUCUGAAUAdTdT | 1884 | 1462-1480 | UAUUCAGAUGUUCUCCCACdTdT | 2451 |
| AD-62139.1 | CAUCUGAAUAUUAUUGUUAdTdT | 1885 | 1471-1489 | UAACAAUAAUAUUCAGAUGdTdT | 2452 |
| AD-62145.1 | UAUUAUUGUUACCCCCAAAdTdT | 1886 | 1479-1497 | UUUGGGGGUAACAAUAAUAdTdT | 2453 |
| AD-62151.1 | CCCAAAAGCCCAUAUAUUGdTdT | 1887 | 1492-1510 | CAAUAUAUGGGCUUUUGGGdTdT | 2454 |
| AD-62110.1 | CCAAAAGCCCAUAUAUUGAdTdT | 1888 | 1493-1511 | UCAAUAUAUGGGCUUUUGGdTdT | 2455 |
| AD-62116.1 | CAAAAGCCCAUAUAUUGACdTdT | 1889 | 1494-1512 | GUCAAUAUAUGGGCUUUUGdTdT | 2456 |
| AD-62122.1 | AAAAGCCCAUAUAUUGACAdTdT | 1890 | 1495-1513 | UGUCAAUAUAUGGGCUUUUdTdT | 2457 |
| AD-62128.1 | AAAGCCCAUAUAUUGACAAdTdT | 1891 | 1496-1514 | UUGUCAAUAUAUGGGCUUUdTdT | 2458 |
| AD-62134.1 | AAGCCCAUAUAUUGACAAAdTdT | 1892 | 1497-1515 | UUUGUCAAUAUAUGGGCUUdTdT | 2459 |
| AD-62140.1 | AGCCCAUAUAUUGACAAAAdTdT | 1893 | 1498-1516 | UUUUGUCAAUAUAUGGGCUdTdT | 2460 |
| AD-62146.1 | GCCCAUAUAUUGACAAAAUdTdT | 1894 | 1499-1517 | AUUUUGUCAAUAUAUGGGCdTdT | 2461 |
| AD-62152.1 | CCCAUAUAUUGACAAAAUAdTdT | 1895 | 1500-1518 | UAUUUUGUCAAUAUAUGGGdTdT | 2462 |
| AD-62111.1 | CCAUAUAUUGACAAAAUAAdTdT | 1896 | 1501-1519 | UUAUUUUGUCAAUAUAUGGdTdT | 2463 |
| AD-62117.1 | CAUAUAUUGACAAAAUAACdTdT | 1897 | 1502-1520 | GUUAUUUUGUCAAUAUAUGdTdT | 2464 |
| AD-62123.1 | AUAUAUUGACAAAAUAACUdTdT | 1898 | 1503-1521 | AGUUAUUUUGUCAAUAUAUdTdT | 2465 |
| AD-62129.1 | UAUAUUGACAAAAUAACUCdTdT | 1899 | 1504-1522 | GAGUUAUUUUGUCAAUAUAdTdT | 2466 |
| AD-62135.1 | AUAUUGACAAAAUAACUCAdTdT | 1900 | 1505-1523 | UGAGUUAUUUUGUCAAUAUdTdT | 2467 |
| AD-62141.1 | UAUUGACAAAAUAACUCACdTdT | 1901 | 1506-1524 | GUGAGUUAUUUUGUCAAUAdTdT | 2468 |
| AD-62147.1 | AUUGACAAAAUAACUCACUdTdT | 1902 | 1507-1525 | AGUGAGUUAUUUUGUCAAUdTdT | 2469 |
| AD-62153.1 | UUGACAAAAUAACUCACUAdTdT | 1903 | 1508-1526 | UAGUGAGUUAUUUUGUCAAdTdT | 2470 |
| AD-62112.1 | UGACAAAAUAACUCACUAUdTdT | 1904 | 1509-1527 | AUAGUGAGUUAUUUUGUCAdTdT | 2471 |
| AD-62118.1 | GACAAAAUAACUCACUAUAdTdT | 1905 | 1510-1528 | UAUAGUGAGUUAUUUUGUCdTdT | 2472 |
| AD-62124.1 | AAAAUAACUCACUAUAAUUdTdT | 1906 | 1513-1531 | AAUUAUAGUGAGUUAUUUUdTdT | 2473 |
| AD-62130.1 | AAAUAACUCACUAUAAUUAdTdT | 1907 | 1514-1532 | UAAUUAUAGUGAGUUAUUUdTdT | 2474 |
| AD-62136.1 | AAUAACUCACUAUAAUUACdTdT | 1908 | 1515-1533 | GUAAUUAUAGUGAGUUAUUdTdT | 2475 |
| AD-62142.1 | AUAACUCACUAUAAUUACUdTdT | 1909 | 1516-1534 | AGUAAUUAUAGUGAGUUAUdTdT | 2476 |
| AD-62148.1 | AACUCACUAUAAUUACUUGdTdT | 1910 | 1518-1536 | CAAGUAAUUAUAGUGAGUUdTdT | 2477 |
| AD-62154.1 | ACUCACUAUAAUUACUUGAdTdT | 1911 | 1519-1537 | UCAAGUAAUUAUAGUGAGUdTdT | 2478 |
| AD-62113.1 | CUCACUAUAAUUACUUGAUdTdT | 1912 | 1520-1538 | AUCAAGUAAUUAUAGUGAGdTdT | 2479 |
| AD-62119.1 | UCACUAUAAUUACUUGAUUdTdT | 1913 | 1521-1539 | AAUCAAGUAAUUAUAGUGAdTdT | 2480 |
| AD-62125.1 | ACUAUAAUUACUUGAUUUUdTdT | 1914 | 1523-1541 | AAAAUCAAGUAAUUAUAGUdTdT | 2481 |
| AD-62131.1 | CUAUAAUUACUUGAUUUUAdTdT | 1915 | 1524-1542 | UAAAAUCAAGUAAUUAUAGdTdT | 2482 |
| AD-62137.1 | UAUAAUUACUUGAUUUUAUdTdT | 1916 | 1525-1543 | AUAAAAUCAAGUAAUUAUAdTdT | 2483 |
| AD-62143.1 | AUAAUUACUUGAUUUUAUCdTdT | 1917 | 1526-1544 | GAUAAAAUCAAGUAAUUAUdTdT | 2484 |
| AD-62149.1 | UAAUUACUUGAUUUUAUCCdTdT | 1918 | 1527-1545 | GGAUAAAAUCAAGUAAUUAdTdT | 2485 |
| AD-62155.1 | AAUUACUUGAUUUUAUCCAdTdT | 1919 | 1528-1546 | UGGAUAAAAUCAAGUAAUUdTdT | 2486 |
| AD-62114.1 | AUUACUUGAUUUUAUCCAAdTdT | 1920 | 1529-1547 | UUGGAUAAAAUCAAGUAAUdTdT | 2487 |
| AD-62120.1 | UUAUCCAAGGGCAAAAUUAdTdT | 1921 | 1540-1558 | UAAUUUUGCCCUUGGAUAAdTdT | 2488 |
| AD-62126.1 | GCAAAAUUAUCCACUUUGGdTdT | 1922 | 1550-1568 | CCAAAGUGGAUAAUUUUGCdTdT | 2489 |
| AD-62132.1 | CACUUUGGCACGAGGGAGAdTdT | 1923 | 1561-1579 | UCUCCCUCGUGCCAAAGUGdTdT | 2490 |
| AD-62138.1 | CGAGGGAGAAAUUUUCAGAdTdT | 1924 | 1571-1589 | UCUGAAAAUUUCUCCCUCGdTdT | 2491 |
| AD-62144.1 | AUUUUCAGAUGCAUCUUAUdTdT | 1925 | 1581-1599 | AUAAGAUGCAUCUGAAAAUdTdT | 2492 |
| AD-62150.1 | GCAUCUUAUCAAAGUAUAAdTdT | 1926 | 1591-1609 | UUAUACUUUGAUAAGAUGCdTdT | 2493 |
| AD-62156.1 | CAAAGUAUAAACAUUCCAGdTdT | 1927 | 1600-1618 | CUGGAAUGUUUAUACUUUGdTdT | 2494 |
| AD-62162.1 | AUUCCAGUAACACAGAACAdTdT | 1928 | 1612-1630 | UGUUCUGUGUUACUGGAAUdTdT | 2495 |
| AD-62168.1 | CACAGAACAUGGUUCCUUCdTdT | 1929 | 1622-1640 | GAAGGAACCAUGUUCUGUGdTdT | 2496 |
| AD-62174.1 | GGUUCCUUCAUCCCGACUUdTdT | 1930 | 1632-1650 | AAGUCGGGAUGAAGGAACCdTdT | 2497 |
| AD-62180.1 | CCCGACUUCUGGUCUAUUAdTdT | 1931 | 1643-1661 | UAAUAGACCAGAAGUCGGGdTdT | 2498 |
| AD-62186.1 | GGUCUAUUACAUCGUCACAdTdT | 1932 | 1653-1671 | UGUGACGAUGUAAUAGACCdTdT | 2499 |
| AD-62192.1 | AUCGUCACAGGAGAACAGAdTdT | 1933 | 1663-1681 | UCUGUUCUCCUGUGACGAUdTdT | 2500 |
| AD-62198.1 | CAGGAGAACAGACAGCAGAdTdT | 1934 | 1670-1688 | UCUGCUGUCUGUUCUCCUGdTdT | 2501 |
| AD-62157.1 | CAGCAGAAUUAGUGUCUGAdTdT | 1935 | 1682-1700 | UCAGACACUAAUUCUGCUGdTdT | 2502 |
| AD-62163.1 | GUGUCUGAUUCAGUCUGGUdTdT | 1936 | 1693-1711 | ACCAGACUGAAUCAGACACdTdT | 2503 |
| AD-62169.1 | CAGUCUGGUUAAAUAUUGAdTdT | 1937 | 1703-1721 | UCAAUAUUUAACCAGACUGdTdT | 2504 |
| AD-62175.1 | GUUAAAUAUUGAAGAAAAAdTdT | 1938 | 1710-1728 | UUUUUCUUCAAUAUUUAACdTdT | 2505 |
| AD-62181.1 | AGAAAAAUGUGGCAACCAGdTdT | 1939 | 1722-1740 | CUGGUUGCCACAUUUUUCUdTdT | 2506 |
| AD-62187.1 | GCAACCAGCUCCAGGUUCAdTdT | 1940 | 1733-1751 | UGAACCUGGAGCUGGUUGCdTdT | 2507 |
| AD-62193.1 | GCUCCAGGUUCAUCUGUCUdTdT | 1941 | 1740-1758 | AGACAGAUGAACCUGGAGCdTdT | 2508 |
| AD-62199.1 | AUCUGUCUCCUGAUGCAGAdTdT | 1942 | 1751-1769 | UCUGCAUCAGGAGACAGAUdTdT | 2509 |
| AD-62158.1 | GAUGCAGAUGCAUAUUCUCdTdT | 1943 | 1762-1780 | GAGAAUAUGCAUCUGCAUCdTdT | 2510 |
| AD-62164.1 | GCAUAUUCUCCAGGCCAAAdTdT | 1944 | 1771-1789 | UUUGGCCUGGAGAAUAUGCdTdT | 2511 |
| AD-62170.1 | AGGCCAAACUGUGUCUCUUdTdT | 1945 | 1782-1800 | AAGAGACACAGUUUGGCCUdTdT | 2512 |
| AD-62176.1 | GUGUCUCUUAAUAUGGCAAdTdT | 1946 | 1792-1810 | UUGCCAUAUUAAGAGACACdTdT | 2513 |
| AD-62182.1 | UUAAUAUGGCAACUGGAAUdTdT | 1947 | 1799-1817 | AUUCCAGUUGCCAUAUUAAdTdT | 2514 |
| AD-62188.1 | AACUGGAAUGGAUUCCUGGdTdT | 1948 | 1809-1827 | CCAGGAAUCCAUUCCAGUUdTdT | 2515 |
| AD-62194.1 | UUCCUGGGUGGCAUUAGCAdTdT | 1949 | 1821-1839 | UGCUAAUGCCACCCAGGAAdTdT | 2516 |
| AD-62200.1 | GGCAUUAGCAGCAGUGGACdTdT | 1950 | 1830-1848 | GUCCACUGCUGCUAAUGCCdTdT | 2517 |
| AD-62159.1 | AGUGGACAGUGCUGUGUAUdTdT | 1951 | 1842-1860 | AUACACAGCACUGUCCACUdTdT | 2518 |
| AD-62165.1 | GCUGUGUAUGGAGUCCAAAdTdT | 1952 | 1852-1870 | UUUGGACUCCAUACACAGCdTdT | 2519 |
| AD-62171.1 | AGUCCAAAGAGGAGCCAAAdTdT | 1953 | 1863-1881 | UUUGGCUCCUCUUUGGACUdTdT | 2520 |
| AD-62177.1 | AGAGGAGCCAAAAAGCCCUdTdT | 1954 | 1870-1888 | AGGGCUUUUUGGCUCCUCUdTdT | 2521 |
| AD-62183.1 | AGCCCUUGGAAAGAGUAUUdTdT | 1955 | 1883-1901 | AAUACUCUUUCCAAGGGCUdTdT | 2522 |
| AD-62189.1 | AAGAGUAUUUCAAUUCUUAdTdT | 1956 | 1893-1911 | UAAGAAUUGAAAUACUCUUdTdT | 2523 |
| AD-62195.1 | UUUCAAUUCUUAGAGAAGAdTdT | 1957 | 1900-1918 | UCUUCUCUAAGAAUUGAAAdTdT | 2524 |
| AD-62201.1 | GAGAAGAGUGAUCUGGGCUdTdT | 1958 | 1912-1930 | AGCCCAGAUCACUCUUCUCdTdT | 2525 |
| AD-62160.1 | UGAUCUGGGCUGUGGGGCAdTdT | 1959 | 1920-1938 | UGCCCCACAGCCCAGAUCAdTdT | 2526 |
| AD-62166.1 | GGGGCAGGUGGUGGCCUCAdTdT | 1960 | 1933-1951 | UGAGGCCACCACCUGCCCCdTdT | 2527 |
| AD-62172.1 | GUGGCCUCAACAAUGCCAAdTdT | 1961 | 1943-1961 | UUGGCAUUGUUGAGGCCACdTdT | 2528 |
| AD-62178.1 | CAACAAUGCCAAUGUGUUCdTdT | 1962 | 1950-1968 | GAACACAUUGGCAUUGUUGdTdT | 2529 |
| AD-62184.1 | CAAUGUGUUCCACCUAGCUdTdT | 1963 | 1959-1977 | AGCUAGGUGGAACACAUUGdTdT | 2530 |
| AD-62190.1 | CACCUAGCUGGACUUACCUdTdT | 1964 | 1969-1987 | AGGUAAGUCCAGCUAGGUGdTdT | 2531 |
| AD-62196.1 | GACUUACCUUCCUCACUAAdTdT | 1965 | 1979-1997 | UUAGUGAGGAAGGUAAGUCdTdT | 2532 |
| AD-62202.1 | UCACUAAUGCAAAUGCAGAdTdT | 1966 | 1991-2009 | UCUGCAUUUGCAUUAGUGAdTdT | 2533 |
| AD-62161.1 | AAAUGCAGAUGACUCCCAAdTdT | 1967 | 2001-2019 | UUGGGAGUCAUCUGCAUUUdTdT | 2534 |
| AD-62167.1 | CUCCCAAGAAAAUGAUGAAdTdT | 1968 | 2013-2031 | UUCAUCAUUUUCUUGGGAGdTdT | 2535 |
| AD-62173.1 | CCUUGUAAAGAAAUUCUCAdTdT | 1969 | 2032-2050 | UGAGAAUUUCUUUACAAGGdTdT | 2536 |
| AD-62179.1 | AAUUCUCAGGCCAAGAAGAdTdT | 1970 | 2043-2061 | UCUUCUUGGCCUGAGAAUUdTdT | 2537 |
| AD-62185.1 | CCAAGAAGAACGCUGCAAAdTdT | 1971 | 2053-2071 | UUUGCAGCGUUCUUCUUGGdTdT | 2538 |
| AD-62191.1 | CGCUGCAAAAGAAGAUAGAdTdT | 1972 | 2063-2081 | UCUAUCUUCUUUUGCAGCGdTdT | 2539 |
| AD-62197.1 | AAAGAAGAUAGAAGAAAUAdTdT | 1973 | 2070-2088 | UAUUUCUUCUAUCUUCUUUdTdT | 2540 |
| AD-62203.1 | AGAAAUAGCUGCUAAAUAUdTdT | 1974 | 2082-2100 | AUAUUUAGCAGCUAUUUCUdTdT | 2541 |
| AD-62209.1 | GCUGCUAAAUAUAAACAUUdTdT | 1975 | 2089-2107 | AAUGUUUAUAUUUAGCAGCdTdT | 2542 |
| AD-62215.1 | ACAUUCAGUAGUGAAGAAAdTdT | 1976 | 2103-2121 | UUUCUUCACUACUGAAUGUdTdT | 2543 |
| AD-62221.1 | GUAGUGAAGAAAUGUUGUUdTdT | 1977 | 2110-2128 | AACAACAUUUCUUCACUACdTdT | 2544 |
| AD-62227.1 | AAAUGUUGUUACGAUGGAGdTdT | 1978 | 2119-2137 | CUCCAUCGUAACAACAUUUdTdT | 2545 |
| AD-62233.1 | CGAUGGAGCCUGCGUUAAUdTdT | 1979 | 2130-2148 | AUUAACGCAGGCUCCAUCGdTdT | 2546 |
| AD-62239.1 | CGUUAAUAAUGAUGAAACCdTdT | 1980 | 2142-2160 | GGUUUCAUCAUUAUUAACGdTdT | 2547 |
| AD-62245.1 | AUGAUGAAACCUGUGAGCAdTdT | 1981 | 2150-2168 | UGCUCACAGGUUUCAUCAUdTdT | 2548 |
| AD-62204.1 | CUGUGAGCAGCGAGCUGCAdTdT | 1982 | 2160-2178 | UGCAGCUCGCUGCUCACAGdTdT | 2549 |
| AD-62210.1 | CGAGCUGCACGGAUUAGUUdTdT | 1983 | 2170-2188 | AACUAAUCCGUGCAGCUCGdTdT | 2550 |
| AD-62216.1 | GGAUUAGUUUAGGGCCAAGdTdT | 1984 | 2180-2198 | CUUGGCCCUAAACUAAUCCdTdT | 2551 |
| AD-62222.1 | GGGCCAAGAUGCAUCAAAGdTdT | 1985 | 2191-2209 | CUUUGAUGCAUCUUGGCCCdTdT | 2552 |
| AD-62228.1 | CAUCAAAGCUUUCACUGAAdTdT | 1986 | 2202-2220 | UUCAGUGAAAGCUUUGAUGdTdT | 2553 |
| AD-62234.1 | GCUUUCACUGAAUGUUGUGdTdT | 1987 | 2209-2227 | CACAACAUUCAGUGAAAGCdTdT | 2554 |
| AD-62240.1 | AAUGUUGUGUCGUCGCAAGdTdT | 1988 | 2219-2237 | CUUGCGACGACACAACAUUdTdT | 2555 |
| AD-62246.1 | CGUCGCAAGCCAGCUCCGUdTdT | 1989 | 2229-2247 | ACGGAGCUGGCUUGCGACGdTdT | 2556 |
| AD-62205.1 | GCUCCGUGCUAAUAUCUCUdTdT | 1990 | 2241-2259 | AGAGAUAUUAGCACGGAGCdTdT | 2557 |
| AD-62211.1 | CUAAUAUCUCUCAUAAAGAdTdT | 1991 | 2249-2267 | UCUUUAUGAGAGAUAUUAGdTdT | 2558 |
| AD-62217.1 | AAAGACAUGCAAUUGGGAAdTdT | 1992 | 2263-2281 | UUCCCAAUUGCAUGUCUUUdTdT | 2559 |
| AD-62223.1 | CAAUUGGGAAGGCUACACAdTdT | 1993 | 2272-2290 | UGUGUAGCCUUCCCAAUUGdTdT | 2560 |
| AD-62229.1 | GCUACACAUGAAGACCCUGdTdT | 1994 | 2283-2301 | CAGGGUCUUCAUGUGUAGCdTdT | 2561 |
| AD-62235.1 | CAUGAAGACCCUGUUACCAdTdT | 1995 | 2289-2307 | UGGUAACAGGGUCUUCAUGdTdT | 2562 |
| AD-62241.1 | UACCAGUAAGCAAGCCAGAdTdT | 1996 | 2303-2321 | UCUGGCUUGCUUACUGGUAdTdT | 2563 |
| AD-62247.1 | AGCAAGCCAGAAAUUCGGAdTdT | 1997 | 2311-2329 | UCCGAAUUUCUGGCUUGCUdTdT | 2564 |
| AD-62206.1 | AGAAAUUCGGAGUUAUUUUdTdT | 1998 | 2319-2337 | AAAAUAACUCCGAAUUUCUdTdT | 2565 |
| AD-62212.1 | AGUUAUUUUCCAGAAAGCUdTdT | 1999 | 2329-2347 | AGCUUUCUGGAAAAUAACUdTdT | 2566 |
| AD-62218.1 | CAGAAAGCUGGUUGUGGGAdTdT | 2000 | 2339-2357 | UCCCACAACCAGCUUUCUGdTdT | 2567 |
| AD-62224.1 | GUGGGAAGUUCAUCUUGUUdTdT | 2001 | 2352-2370 | AACAAGAUGAACUUCCCACdTdT | 2568 |
| AD-62230.1 | UCAUCUUGUUCCCAGAAGAdTdT | 2002 | 2361-2379 | UCUUCUGGGAACAAGAUGAdTdT | 2569 |
| AD-62236.1 | CCAGAAGAAAACAGUUGCAdTdT | 2003 | 2372-2390 | UGCAACUGUUUUCUUCUGGdTdT | 2570 |
| AD-62242.1 | CAGUUGCAGUUUGCCCUACdTdT | 2004 | 2383-2401 | GUAGGGCAAACUGCAACUGdTdT | 2571 |
| AD-62248.1 | CAGUUUGCCCUACCUGAUUdTdT | 2005 | 2389-2407 | AAUCAGGUAGGGCAAACUGdTdT | 2572 |
| AD-62207.1 | CCUGAUUCUCUAACCACCUdTdT | 2006 | 2401-2419 | AGGUGGUUAGAGAAUCAGGdTdT | 2573 |
| AD-62213.1 | ACCACCUGGGAAAUUCAAGdTdT | 2007 | 2413-2431 | CUUGAAUUUCCCAGGUGGUdTdT | 2574 |
| AD-62219.1 | GAAAUUCAAGGCGUUGGCAdTdT | 2008 | 2422-2440 | UGCCAACGCCUUGAAUUUCdTdT | 2575 |
| AD-62225.1 | CGUUGGCAUUUCAAACACUdTdT | 2009 | 2433-2451 | AGUGUUUGAAAUGCCAACGdTdT | 2576 |
| AD-62231.1 | CAUUUCAAACACUGGUAUAdTdT | 2010 | 2439-2457 | UAUACCAGUGUUUGAAAUGdTdT | 2577 |
| AD-62237.1 | GUAUAUGUGUUGCUGAUACdTdT | 2011 | 2453-2471 | GUAUCAGCAACACAUAUACdTdT | 2578 |
| AD-62243.1 | UGCUGAUACUGUCAAGGCAdTdT | 2012 | 2463-2481 | UGCCUUGACAGUAUCAGCAdTdT | 2579 |
| AD-62249.1 | CUGUCAAGGCAAAGGUGUUdTdT | 2013 | 2471-2489 | AACACCUUUGCCUUGACAGdTdT | 2580 |
| AD-62208.1 | AGGUGUUCAAAGAUGUCUUdTdT | 2014 | 2483-2501 | AAGACAUCUUUGAACACCUdTdT | 2581 |
| AD-62214.1 | CAAAGAUGUCUUCCUGGAAdTdT | 2015 | 2490-2508 | UUCCAGGAAGACAUCUUUGdTdT | 2582 |
| AD-62220.1 | CUUCCUGGAAAUGAAUAUAdTdT | 2016 | 2499-2517 | UAUAUUCAUUUCCAGGAAGdTdT | 2583 |
| AD-62226.1 | GAAUAUACCAUAUUCUGUUdTdT | 2017 | 2511-2529 | AACAGAAUAUGGUAUAUUCdTdT | 2584 |
| AD-62232.1 | AUAUUCUGUUGUACGAGGAdTdT | 2018 | 2520-2538 | UCCUCGUACAACAGAAUAUdTdT | 2585 |
| AD-62238.1 | CGAGGAGAACAGAUCCAAUdTdT | 2019 | 2533-2551 | AUUGGAUCUGUUCUCCUCGdTdT | 2586 |
| AD-62244.1 | GAACAGAUCCAAUUGAAAGdTdT | 2020 | 2539-2557 | CUUUCAAUUGGAUCUGUUCdTdT | 2587 |
| AD-61874.1 | GAAAGGAACUGUUUACAACdTdT | 2021 | 2553-2571 | GUUGUAAACAGUUCCUUUCdTdT | 2588 |
| AD-61880.1 | ACUGUUUACAACUAUAGGAdTdT | 2022 | 2560-2578 | UCCUAUAGUUGUAAACAGUdTdT | 2589 |
| AD-61886.1 | AACUAUAGGACUUCUGGGAdTdT | 2023 | 2569-2587 | UCCCAGAAGUCCUAUAGUUdTdT | 2590 |
| AD-61892.1 | UGGGAUGCAGUUCUGUGUUdTdT | 2024 | 2583-2601 | AACACAGAACUGCAUCCCAdTdT | 2591 |
| AD-61898.1 | GUUCUGUGUUAAAAUGUCUdTdT | 2025 | 2592-2610 | AGACAUUUUAACACAGAACdTdT | 2592 |
| AD-61904.1 | UUAAAAUGUCUGCUGUGGAdTdT | 2026 | 2600-2618 | UCCACAGCAGACAUUUUAAdTdT | 2593 |
| AD-61910.1 | CUGUGGAGGGAAUCUGCACdTdT | 2027 | 2612-2630 | GUGCAGAUUCCCUCCACAGdTdT | 2594 |
| AD-61916.1 | GGAAUCUGCACUUCGGAAAdTdT | 2028 | 2620-2638 | UUUCCGAAGUGCAGAUUCCdTdT | 2595 |
| AD-61875.1 | CGGAAAGCCCAGUCAUUGAdTdT | 2029 | 2633-2651 | UCAAUGACUGGGCUUUCCGdTdT | 2596 |
| AD-61881.1 | CCAGUCAUUGAUCAUCAGGdTdT | 2030 | 2641-2659 | CCUGAUGAUCAAUGACUGGdTdT | 2597 |
| AD-61887.1 | CAUCAGGGCACAAAGUCCUdTdT | 2031 | 2653-2671 | AGGACUUUGUGCCCUGAUGdTdT | 2598 |
| AD-61893.1 | GGCACAAAGUCCUCCAAAUdTdT | 2032 | 2659-2677 | AUUUGGAGGACUUUGUGCCdTdT | 2599 |
| AD-61899.1 | CAAAUGUGUGCGCCAGAAAdTdT | 2033 | 2673-2691 | UUUCUGGCGCACACAUUUGdTdT | 2600 |
| AD-61905.1 | GCGCCAGAAAGUAGAGGGCdTdT | 2034 | 2682-2700 | GCCCUCUACUUUCUGGCGCdTdT | 2601 |
| AD-61911.1 | AGUAGAGGGCUCCUCCAGUdTdT | 2035 | 2691-2709 | ACUGGAGGAGCCCUCUACUdTdT | 2602 |
| AD-61917.1 | CCUCCAGUCACUUGGUGACdTdT | 2036 | 2702-2720 | GUCACCAAGUGACUGGAGGdTdT | 2603 |
| AD-61876.1 | UCACUUGGUGACAUUCACUdTdT | 2037 | 2709-2727 | AGUGAAUGUCACCAAGUGAdTdT | 2604 |
| AD-61882.1 | CAUUCACUGUGCUUCCUCUdTdT | 2038 | 2720-2738 | AGAGGAAGCACAGUGAAUGdTdT | 2605 |
| AD-61888.1 | GGAAAUUGGCCUUCACAACdTdT | 2039 | 2739-2757 | GUUGUGAAGGCCAAUUUCCdTdT | 2606 |
| AD-61894.1 | CUUCACAACAUCAAUUUUUdTdT | 2040 | 2749-2767 | AAAAAUUGAUGUUGUGAAGdTdT | 2607 |
| AD-61900.1 | AAUUUUUCACUGGAGACUUdTdT | 2041 | 2761-2779 | AAGUCUCCAGUGAAAAAUUdTdT | 2608 |
| AD-61906.1 | CUGGAGACUUGGUUUGGAAdTdT | 2042 | 2770-2788 | UUCCAAACCAAGUCUCCAGdTdT | 2609 |
| AD-61912.1 | GGUUUGGAAAAGAAAUCUUdTdT | 2043 | 2780-2798 | AAGAUUUCUUUUCCAAACCdTdT | 2610 |
| AD-61918.1 | AAUCUUAGUAAAAACAUUAdTdT | 2044 | 2793-2811 | UAAUGUUUUUACUAAGAUUdTdT | 2611 |
| AD-61877.1 | AAAAACAUUACGAGUGGUGdTdT | 2045 | 2802-2820 | CACCACUCGUAAUGUUUUUdTdT | 2612 |
| AD-61883.1 | GAGUGGUGCCAGAAGGUGUdTdT | 2046 | 2813-2831 | ACACCUUCUGGCACCACUCdTdT | 2613 |
| AD-61889.1 | AGAAGGUGUCAAAAGGGAAdTdT | 2047 | 2823-2841 | UUCCCUUUUGACACCUUCUdTdT | 2614 |
| AD-61895.1 | UGUCAAAAGGGAAAGCUAUdTdT | 2048 | 2829-2847 | AUAGCUUUCCCUUUUGACAdTdT | 2615 |
| AD-61901.1 | GCUAUUCUGGUGUUACUUUdTdT | 2049 | 2843-2861 | AAAGUAACACCAGAAUAGCdTdT | 2616 |
| AD-61907.1 | GUGUUACUUUGGAUCCUAGdTdT | 2050 | 2852-2870 | CUAGGAUCCAAAGUAACACdTdT | 2617 |
| AD-61913.1 | GGAUCCUAGGGGUAUUUAUdTdT | 2051 | 2862-2880 | AUAAAUACCCCUAGGAUCCdTdT | 2618 |
| AD-61919.1 | GGUAUUUAUGGUACCAUUAdTdT | 2052 | 2872-2890 | UAAUGGUACCAUAAAUACCdTdT | 2619 |
| AD-61878.1 | GUACCAUUAGCAGACGAAAdTdT | 2053 | 2882-2900 | UUUCGUCUGCUAAUGGUACdTdT | 2620 |
| AD-61884.1 | CAGACGAAAGGAGUUCCCAdTdT | 2054 | 2892-2910 | UGGGAACUCCUUUCGUCUGdTdT | 2621 |
| AD-61890.1 | AGGAGUUCCCAUACAGGAUdTdT | 2055 | 2900-2918 | AUCCUGUAUGGGAACUCCUdTdT | 2622 |
| AD-61896.1 | CAUACAGGAUACCCUUAGAdTdT | 2056 | 2909-2927 | UCUAAGGGUAUCCUGUAUGdTdT | 2623 |
| AD-61902.1 | CUUAGAUUUGGUCCCCAAAdTdT | 2057 | 2922-2940 | UUUGGGGACCAAAUCUAAGdTdT | 2624 |
| AD-61908.1 | UCCCCAAAACAGAAAUCAAdTdT | 2058 | 2933-2951 | UUGAUUUCUGUUUUGGGGAdTdT | 2625 |
| AD-61914.1 | ACAGAAAUCAAAAGGAUUUdTdT | 2059 | 2941-2959 | AAAUCCUUUUGAUUUCUGUdTdT | 2626 |
| AD-61920.1 | AAAGGAUUUUGAGUGUAAAdTdT | 2060 | 2951-2969 | UUUACACUCAAAAUCCUUUdTdT | 2627 |
| AD-61879.1 | AGUGUAAAAGGACUGCUUGdTdT | 2061 | 2962-2980 | CAAGCAGUCCUUUUACACUdTdT | 2628 |
| AD-61885.1 | AAGGACUGCUUGUAGGUGAdTdT | 2062 | 2969-2987 | UCACCUACAAGCAGUCCUUdTdT | 2629 |
| AD-61891.1 | GUAGGUGAGAUCUUGUCUGdTdT | 2063 | 2980-2998 | CAGACAAGAUCUCACCUACdTdT | 2630 |
| AD-61897.1 | AUCUUGUCUGCAGUUCUAAdTdT | 2064 | 2989-3007 | UUAGAACUGCAGACAAGAUdTdT | 2631 |
| AD-61903.1 | GUUCUAAGUCAGGAAGGCAdTdT | 2065 | 3001-3019 | UGCCUUCCUGACUUAGAACdTdT | 2632 |
| AD-61909.1 | GAAGGCAUCAAUAUCCUAAdTdT | 2066 | 3013-3031 | UUAGGAUAUUGAUGCCUUCdTdT | 2633 |
| AD-61915.1 | UCAAUAUCCUAACCCACCUdTdT | 2067 | 3020-3038 | AGGUGGGUUAGGAUAUUGAdTdT | 2634 |
| AD-61921.1 | CCACCUCCCCAAAGGGAGUdTdT | 2068 | 3033-3051 | ACUCCCUUUGGGGAGGUGGdTdT | 2635 |
| AD-61927.1 | CCCCAAAGGGAGUGCAGAGdTdT | 2069 | 3039-3057 | CUCUGCACUCCCUUUGGGGdTdT | 2636 |
| AD-61933.1 | GUGCAGAGGCGGAGCUGAUdTdT | 2070 | 3050-3068 | AUCAGCUCCGCCUCUGCACdTdT | 2637 |
| AD-61939.1 | GGAGCUGAUGAGCGUUGUCdTdT | 2071 | 3060-3078 | GACAACGCUCAUCAGCUCCdTdT | 2638 |
| AD-61945.1 | CGUUGUCCCAGUAUUCUAUdTdT | 2072 | 3072-3090 | AUAGAAUACUGGGACAACGdTdT | 2639 |
| AD-61951.1 | CCAGUAUUCUAUGUUUUUCdTdT | 2073 | 3079-3097 | GAAAAACAUAGAAUACUGGdTdT | 2640 |
| AD-61957.1 | GUUUUUCACUACCUGGAAAdTdT | 2074 | 3091-3109 | UUUCCAGGUAGUGAAAAACdTdT | 2641 |
| AD-61963.1 | CCUGGAAACAGGAAAUCAUdTdT | 2075 | 3102-3120 | AUGAUUUCCUGUUUCCAGGdTdT | 2642 |
| AD-61922.1 | GGAACAUUUUUCAUUCUGAdTdT | 2076 | 3122-3140 | UCAGAAUGAAAAAUGUUCCdTdT | 2643 |
| AD-61928.1 | CAUUCUGACCCAUUAAUUGdTdT | 2077 | 3133-3151 | CAAUUAAUGGGUCAGAAUGdTdT | 2644 |
| AD-61934.1 | CCAUUAAUUGAAAAGCAGAdTdT | 2078 | 3142-3160 | UCUGCUUUUCAAUUAAUGGdTdT | 2645 |
| AD-61940.1 | AAAGCAGAAACUGAAGAAAdTdT | 2079 | 3153-3171 | UUUCUUCAGUUUCUGCUUUdTdT | 2646 |
| AD-61946.1 | AACUGAAGAAAAAAUUAAAdTdT | 2080 | 3161-3179 | UUUAAUUUUUUCUUCAGUUdTdT | 2647 |
| AD-61952.1 | AAAAAAUUAAAAGAAGGGAdTdT | 2081 | 3169-3187 | UCCCUUCUUUUAAUUUUUUdTdT | 2648 |
| AD-61958.1 | AGGGAUGUUGAGCAUUAUGdTdT | 2082 | 3183-3201 | CAUAAUGCUCAACAUCCCUdTdT | 2649 |
| AD-61964.1 | GAGCAUUAUGUCCUACAGAdTdT | 2083 | 3192-3210 | UCUGUAGGACAUAAUGCUCdTdT | 2650 |
| AD-61923.1 | UGUCCUACAGAAAUGCUGAdTdT | 2084 | 3200-3218 | UCAGCAUUUCUGUAGGACAdTdT | 2651 |
| AD-61929.1 | AAUGCUGACUACUCUUACAdTdT | 2085 | 3211-3229 | UGUAAGAGUAGUCAGCAUUdTdT | 2652 |
| AD-61935.1 | UACUCUUACAGUGUGUGGAdTdT | 2086 | 3220-3238 | UCCACACACUGUAAGAGUAdTdT | 2653 |
| AD-61941.1 | AGUGUGUGGAAGGGUGGAAdTdT | 2087 | 3229-3247 | UUCCACCCUUCCACACACUdTdT | 2654 |
| AD-61947.1 | GGGUGGAAGUGCUAGCACUdTdT | 2088 | 3240-3258 | AGUGCUAGCACUUCCACCCdTdT | 2655 |
| AD-61953.1 | GCUAGCACUUGGUUAACAGdTdT | 2089 | 3250-3268 | CUGUUAACCAAGUGCUAGCdTdT | 2656 |
| AD-61959.1 | GGUUAACAGCUUUUGCUUUdTdT | 2090 | 3260-3278 | AAAGCAAAAGCUGUUAACCdTdT | 2657 |
| AD-61965.1 | UGCUUUAAGAGUACUUGGAdTdT | 2091 | 3273-3291 | UCCAAGUACUCUUAAAGCAdTdT | 2658 |
| AD-61924.1 | GUACUUGGACAAGUAAAUAdTdT | 2092 | 3283-3301 | UAUUUACUUGUCCAAGUACdTdT | 2659 |
| AD-61930.1 | CAAGUAAAUAAAUACGUAGdTdT | 2093 | 3292-3310 | CUACGUAUUUAUUUACUUGdTdT | 2660 |
| AD-61936.1 | AUAAAUACGUAGAGCAGAAdTdT | 2094 | 3299-3317 | UUCUGCUCUACGUAUUUAUdTdT | 2661 |
| AD-61942.1 | GAGCAGAACCAAAAUUCAAdTdT | 2095 | 3310-3328 | UUGAAUUUUGGUUCUGCUCdTdT | 2662 |
| AD-61948.1 | AAUUCAAUUUGUAAUUCUUdTdT | 2096 | 3322-3340 | AAGAAUUACAAAUUGAAUUdTdT | 2663 |
| AD-61954.1 | GUAAUUCUUUAUUGUGGCUdTdT | 2097 | 3332-3350 | AGCCACAAUAAAGAAUUACdTdT | 2664 |
| AD-61960.1 | AUUGUGGCUAGUUGAGAAUdTdT | 2098 | 3342-3360 | AUUCUCAACUAGCCACAAUdTdT | 2665 |
| AD-61966.1 | CUAGUUGAGAAUUAUCAAUdTdT | 2099 | 3349-3367 | AUUGAUAAUUCUCAACUAGdTdT | 2666 |
| AD-61925.1 | UUAUCAAUUAGAUAAUGGAdTdT | 2100 | 3360-3378 | UCCAUUAUCUAAUUGAUAAdTdT | 2667 |
| AD-61931.1 | AAUGGAUCUUUCAAGGAAAdTdT | 2101 | 3373-3391 | UUUCCUUGAAAGAUCCAUUdTdT | 2668 |
| AD-61937.1 | CUUUCAAGGAAAAUUCACAdTdT | 2102 | 3380-3398 | UGUGAAUUUUCCUUGAAAGdTdT | 2669 |
| AD-61943.1 | AAUUCACAGUAUCAACCAAdTdT | 2103 | 3391-3409 | UUGGUUGAUACUGUGAAUUdTdT | 2670 |
| AD-61949.1 | GUAUCAACCAAUAAAAUUAdTdT | 2104 | 3399-3417 | UAAUUUUAUUGGUUGAUACdTdT | 2671 |
| AD-61955.1 | AAAAUUACAGGGUACCUUGdTdT | 2105 | 3411-3429 | CAAGGUACCCUGUAAUUUUdTdT | 2672 |
| AD-61961.1 | AGGGUACCUUGCCUGUUGAdTdT | 2106 | 3419-3437 | UCAACAGGCAAGGUACCCUdTdT | 2673 |
| AD-61967.1 | GUUGAAGCCCGAGAGAACAdTdT | 2107 | 3433-3451 | UGUUCUCUCGGGCUUCAACdTdT | 2674 |
| AD-61926.1 | CCGAGAGAACAGCUUAUAUdTdT | 2108 | 3441-3459 | AUAUAAGCUGUUCUCUCGGdTdT | 2675 |
| AD-61932.1 | GCUUAUAUCUUACAGCCUUdTdT | 2109 | 3452-3470 | AAGGCUGUAAGAUAUAAGCdTdT | 2676 |
| AD-61938.1 | CUUACAGCCUUUACUGUGAdTdT | 2110 | 3460-3478 | UCACAGUAAAGGCUGUAAGdTdT | 2677 |
| AD-61944.1 | GAAUUAGAAAGGCUUUCGAdTdT | 2111 | 3482-3500 | UCGAAAGCCUUUCUAAUUCdTdT | 2678 |
| AD-61950.1 | GGCUUUCGAUAUAUGCCCCdTdT | 2112 | 3492-3510 | GGGGCAUAUAUCGAAAGCCdTdT | 2679 |
| AD-61956.1 | GAUAUAUGCCCCCUGGUGAdTdT | 2113 | 3499-3517 | UCACCAGGGGGCAUAUAUCdTdT | 2680 |
| AD-61962.1 | GGUGAAAAUCGACACAGCUdTdT | 2114 | 3513-3531 | AGCUGUGUCGAUUUUCACCdTdT | 2681 |
| AD-61968.1 | CGACACAGCUCUAAUUAAAdTdT | 2115 | 3522-3540 | UUUAAUUAGAGCUGUGUCGdTdT | 2682 |
| AD-61974.1 | GCUCUAAUUAAAGCUGACAdTdT | 2116 | 3529-3547 | UGUCAGCUUUAAUUAGAGCdTdT | 2683 |
| AD-61980.1 | CUGACAACUUUCUGCUUGAdTdT | 2117 | 3542-3560 | UCAAGCAGAAAGUUGUCAGdTdT | 2684 |
| AD-61986.1 | CUUUCUGCUUGAAAAUACAdTdT | 2118 | 3549-3567 | UGUAUUUUCAAGCAGAAAGdTdT | 2685 |
| AD-61992.1 | AAAAUACACUGCCAGCCCAdTdT | 2119 | 3560-3578 | UGGGCUGGCAGUGUAUUUUdTdT | 2686 |
| AD-61998.1 | AGCCCAGAGCACCUUUACAdTdT | 2120 | 3573-3591 | UGUAAAGGUGCUCUGGGCUdTdT | 2687 |
| AD-62004.1 | GCACCUUUACAUUGGCCAUdTdT | 2121 | 3581-3599 | AUGGCCAAUGUAAAGGUGCdTdT | 2688 |
| AD-62010.1 | ACAUUGGCCAUUUCUGCGUdTdT | 2122 | 3589-3607 | ACGCAGAAAUGGCCAAUGUdTdT | 2689 |
| AD-61969.1 | CUGCGUAUGCUCUUUCCCUdTdT | 2123 | 3602-3620 | AGGGAAAGAGCAUACGCAGdTdT | 2690 |
| AD-61975.1 | CUUUCCCUGGGAGAUAAAAdTdT | 2124 | 3613-3631 | UUUUAUCUCCCAGGGAAAGdTdT | 2691 |
| AD-61981.1 | GAGAUAAAACUCACCCACAdTdT | 2125 | 3623-3641 | UGUGGGUGAGUUUUAUCUCdTdT | 2692 |
| AD-61987.1 | ACUCACCCACAGUUUCGUUdTdT | 2126 | 3631-3649 | AACGAAACUGUGGGUGAGUdTdT | 2693 |
| AD-61993.1 | CAGUUUCGUUCAAUUGUUUdTdT | 2127 | 3640-3658 | AAACAAUUGAACGAAACUGdTdT | 2694 |
| AD-61999.1 | CAAUUGUUUCAGCUUUGAAdTdT | 2128 | 3650-3668 | UUCAAAGCUGAAACAAUUGdTdT | 2695 |
| AD-62005.1 | CUUUGAAGAGAGAAGCUUUdTdT | 2129 | 3662-3680 | AAAGCUUCUCUCUUCAAAGdTdT | 2696 |
| AD-62011.1 | GAGAGAAGCUUUGGUUAAAdTdT | 2130 | 3669-3687 | UUUAACCAAAGCUUCUCUCdTdT | 2697 |
| AD-61970.1 | GUUAAAGGUAAUCCACCCAdTdT | 2131 | 3682-3700 | UGGGUGGAUUACCUUUAACdTdT | 2698 |
| AD-61976.1 | AAUCCACCCAUUUAUCGUUdTdT | 2132 | 3691-3709 | AACGAUAAAUGGGUGGAUUdTdT | 2699 |
| AD-61982.1 | CAUUUAUCGUUUUUGGAAAdTdT | 2133 | 3699-3717 | UUUCCAAAAACGAUAAAUGdTdT | 2700 |
| AD-61988.1 | UUUGGAAAGACAAUCUUCAdTdT | 2134 | 3710-3728 | UGAAGAUUGUCUUUCCAAAdTdT | 2701 |
| AD-61994.1 | AAUCUUCAGCAUAAAGACAdTdT | 2135 | 3721-3739 | UGUCUUUAUGCUGAAGAUUdTdT | 2702 |
| AD-62006.1 | CUCUGUACCUAACACUGGUdTdT | 2136 | 3741-3759 | ACCAGUGUUAGGUACAGAGdTdT | 2703 |
| AD-62012.1 | ACACUGGUACGGCACGUAUdTdT | 2137 | 3752-3770 | AUACGUGCCGUACCAGUGUdTdT | 2704 |
| AD-61971.1 | GGCACGUAUGGUAGAAACAdTdT | 2138 | 3762-3780 | UGUUUCUACCAUACGUGCCdTdT | 2705 |
| AD-61977.1 | GGUAGAAACAACUGCCUAUdTdT | 2139 | 3771-3789 | AUAGGCAGUUGUUUCUACCdTdT | 2706 |
| AD-61983.1 | CAACUGCCUAUGCUUUACUdTdT | 2140 | 3779-3797 | AGUAAAGCAUAGGCAGUUGdTdT | 2707 |
| AD-61989.1 | CUUUACUCACCAGUCUGAAdTdT | 2141 | 3791-3809 | UUCAGACUGGUGAGUAAAGdTdT | 2708 |
| AD-61995.1 | GUCUGAACUUGAAAGAUAUdTdT | 2142 | 3803-3821 | AUAUCUUUCAAGUUCAGACdTdT | 2709 |
| AD-62001.1 | ACUUGAAAGAUAUAAAUUAdTdT | 2143 | 3809-3827 | UAAUUUAUAUCUUUCAAGUdTdT | 2710 |
| AD-62007.1 | UAUAAAUUAUGUUAACCCAdTdT | 2144 | 3819-3837 | UGGGUUAACAUAAUUUAUAdTdT | 2711 |
| AD-62013.1 | GUUAACCCAGUCAUCAAAUdTdT | 2145 | 3829-3847 | AUUUGAUGACUGGGUUAACdTdT | 2712 |
| AD-61972.1 | UCAUCAAAUGGCUAUCAGAdTdT | 2146 | 3839-3857 | UCUGAUAGCCAUUUGAUGAdTdT | 2713 |
| AD-61978.1 | UAUCAGAAGAGCAGAGGUAdTdT | 2147 | 3851-3869 | UACCUCUGCUCUUCUGAUAdTdT | 2714 |
| AD-61984.1 | AGAGGUAUGGAGGUGGCUUdTdT | 2148 | 3863-3881 | AAGCCACCUCCAUACCUCUdTdT | 2715 |
| AD-61990.1 | GAGGUGGCUUUUAUUCAACdTdT | 2149 | 3872-3890 | GUUGAAUAAAAGCCACCUCdTdT | 2716 |
| AD-61996.1 | UAUUCAACCCAGGACACAAdTdT | 2150 | 3883-3901 | UUGUGUCCUGGGUUGAAUAdTdT | 2717 |
| AD-62002.1 | AGGACACAAUCAAUGCCAUdTdT | 2151 | 3893-3911 | AUGGCAUUGAUUGUGUCCUdTdT | 2718 |
| AD-62008.1 | CAAUCAAUGCCAUUGAGGGdTdT | 2152 | 3899-3917 | CCCUCAAUGGCAUUGAUUGdTdT | 2719 |
| AD-62014.1 | CAUUGAGGGCCUGACGGAAdTdT | 2153 | 3909-3927 | UUCCGUCAGGCCCUCAAUGdTdT | 2720 |
| AD-61973.1 | ACGGAAUAUUCACUCCUGGdTdT | 2154 | 3922-3940 | CCAGGAGUGAAUAUUCCGUdTdT | 2721 |
| AD-61979.1 | UUCACUCCUGGUUAAACAAdTdT | 2155 | 3930-3948 | UUGUUUAACCAGGAGUGAAdTdT | 2722 |
| AD-61985.1 | GGUUAAACAACUCCGCUUGdTdT | 2156 | 3939-3957 | CAAGCGGAGUUGUUUAACCdTdT | 2723 |
| AD-61991.1 | CCGCUUGAGUAUGGACAUCdTdT | 2157 | 3951-3969 | GAUGUCCAUACUCAAGCGGdTdT | 2724 |
| AD-61997.1 | GGACAUCGAUGUUUCUUACdTdT | 2158 | 3963-3981 | GUAAGAAACAUCGAUGUCCdTdT | 2725 |
| AD-62003.1 | CGAUGUUUCUUACAAGCAUdTdT | 2159 | 3969-3987 | AUGCUUGUAAGAAACAUCGdTdT | 2726 |
| AD-62009.1 | CAAGCAUAAAGGUGCCUUAdTdT | 2160 | 3981-3999 | UAAGGCACCUUUAUGCUUGdTdT | 2727 |
| AD-62056.1 | GUGCCUUACAUAAUUAUAAdTdT | 2161 | 3992-4010 | UUAUAAUUAUGUAAGGCACdTdT | 2728 |
| AD-62015.1 | ACAUAAUUAUAAAAUGACAdTdT | 2162 | 3999-4017 | UGUCAUUUUAUAAUUAUGUdTdT | 2729 |
| AD-62021.1 | AAAAUGACAGACAAGAAUUdTdT | 2163 | 4009-4027 | AAUUCUUGUCUGUCAUUUUdTdT | 2730 |
| AD-62027.1 | CAAGAAUUUCCUUGGGAGGdTdT | 2164 | 4020-4038 | CCUCCCAAGGAAAUUCUUGdTdT | 2731 |
| AD-62033.1 | CCUUGGGAGGCCAGUAGAGdTdT | 2165 | 4029-4047 | CUCUACUGGCCUCCCAAGGdTdT | 2732 |
| AD-62039.1 | AGUAGAGGUGCUUCUCAAUdTdT | 2166 | 4041-4059 | AUUGAGAAGCACCUCUACUdTdT | 2733 |
| AD-62045.1 | CUUCUCAAUGAUGACCUCAdTdT | 2167 | 4051-4069 | UGAGGUCAUCAUUGAGAAGdTdT | 2734 |
| AD-62051.1 | UGACCUCAUUGUCAGUACAdTdT | 2168 | 4062-4080 | UGUACUGACAAUGAGGUCAdTdT | 2735 |
| AD-62057.1 | GUCAGUACAGGAUUUGGCAdTdT | 2169 | 4072-4090 | UGCCAAAUCCUGUACUGACdTdT | 2736 |
| AD-62016.1 | AGGAUUUGGCAGUGGCUUGdTdT | 2170 | 4080-4098 | CAAGCCACUGCCAAAUCCUdTdT | 2737 |
| AD-62022.1 | UGGCUUGGCUACAGUACAUdTdT | 2171 | 4092-4110 | AUGUACUGUAGCCAAGCCAdTdT | 2738 |
| AD-62028.1 | GCUACAGUACAUGUAACAAdTdT | 2172 | 4099-4117 | UUGUUACAUGUACUGUAGCdTdT | 2739 |
| AD-62034.1 | AACAACUGUAGUUCACAAAdTdT | 2173 | 4113-4131 | UUUGUGAACUACAGUUGUUdTdT | 2740 |
| AD-62040.1 | GUAGUUCACAAAACCAGUAdTdT | 2174 | 4120-4138 | UACUGGUUUUGUGAACUACdTdT | 2741 |
| AD-62046.1 | AAACCAGUACCUCUGAGGAdTdT | 2175 | 4130-4148 | UCCUCAGAGGUACUGGUUUdTdT | 2742 |
| AD-62052.1 | UGAGGAAGUUUGCAGCUUUdTdT | 2176 | 4143-4161 | AAAGCUGCAAACUUCCUCAdTdT | 2743 |
| AD-62058.1 | UGCAGCUUUUAUUUGAAAAdTdT | 2177 | 4153-4171 | UUUUCAAAUAAAAGCUGCAdTdT | 2744 |
| AD-62017.1 | AUUUGAAAAUCGAUACUCAdTdT | 2178 | 4163-4181 | UGAGUAUCGAUUUUCAAAUdTdT | 2745 |
| AD-62023.1 | CGAUACUCAGGAUAUUGAAdTdT | 2179 | 4173-4191 | UUCAAUAUCCUGAGUAUCGdTdT | 2746 |
| AD-62029.1 | GGAUAUUGAAGCAUCCCACdTdT | 2180 | 4182-4200 | GUGGGAUGCUUCAAUAUCCdTdT | 2747 |
| AD-62035.1 | GAAGCAUCCCACUACAGAGdTdT | 2181 | 4189-4207 | CUCUGUAGUGGGAUGCUUCdTdT | 2748 |
| AD-62041.1 | ACUACAGAGGCUACGGAAAdTdT | 2182 | 4199-4217 | UUUCCGUAGCCUCUGUAGUdTdT | 2749 |
| AD-62047.1 | CGGAAACUCUGAUUACAAAdTdT | 2183 | 4212-4230 | UUUGUAAUCAGAGUUUCCGdTdT | 2750 |
| AD-62053.1 | UGAUUACAAACGCAUAGUAdTdT | 2184 | 4221-4239 | UACUAUGCGUUUGUAAUCAdTdT | 2751 |
| AD-62059.1 | GCAUAGUAGCAUGUGCCAGdTdT | 2185 | 4232-4250 | CUGGCACAUGCUACUAUGCdTdT | 2752 |
| AD-62018.1 | GCAUGUGCCAGCUACAAGCdTdT | 2186 | 4240-4258 | GCUUGUAGCUGGCACAUGCdTdT | 2753 |
| AD-62024.1 | CUACAAGCCCAGCAGGGAAdTdT | 2187 | 4251-4269 | UUCCCUGCUGGGCUUGUAGdTdT | 2754 |
| AD-62030.1 | CAGCAGGGAAGAAUCAUCAdTdT | 2188 | 4260-4278 | UGAUGAUUCUUCCCUGCUGdTdT | 2755 |
| AD-62036.1 | GAAUCAUCAUCUGGAUCCUdTdT | 2189 | 4270-4288 | AGGAUCCAGAUGAUGAUUCdTdT | 2756 |
| AD-62042.1 | GAUCCUCUCAUGCGGUGAUdTdT | 2190 | 4283-4301 | AUCACCGCAUGAGAGGAUCdTdT | 2757 |
| AD-62048.1 | CUCAUGCGGUGAUGGACAUdTdT | 2191 | 4289-4307 | AUGUCCAUCACCGCAUGAGdTdT | 2758 |
| AD-62054.1 | GAUGGACAUCUCCUUGCCUdTdT | 2192 | 4299-4317 | AGGCAAGGAGAUGUCCAUCdTdT | 2759 |
| AD-62060.1 | CUUGCCUACUGGAAUCAGUdTdT | 2193 | 4311-4329 | ACUGAUUCCAGUAGGCAAGdTdT | 2760 |
| AD-62019.1 | GAAUCAGUGCAAAUGAAGAdTdT | 2194 | 4322-4340 | UCUUCAUUUGCACUGAUUCdTdT | 2761 |
| AD-62025.1 | AAAUGAAGAAGACUUAAAAdTdT | 2195 | 4332-4350 | UUUUAAGUCUUCUUCAUUUdTdT | 2762 |
| AD-62031.1 | GAAGACUUAAAAGCCCUUGdTdT | 2196 | 4339-4357 | CAAGGGCUUUUAAGUCUUCdTdT | 2763 |
| AD-62037.1 | CCUUGUGGAAGGGGUGGAUdTdT | 2197 | 4353-4371 | AUCCACCCCUUCCACAAGGdTdT | 2764 |
| AD-62043.1 | GAAGGGGUGGAUCAACUAUdTdT | 2198 | 4360-4378 | AUAGUUGAUCCACCCCUUCdTdT | 2765 |
| AD-62049.1 | AUCAACUAUUCACUGAUUAdTdT | 2199 | 4370-4388 | UAAUCAGUGAAUAGUUGAUdTdT | 2766 |
| AD-62055.1 | CACUGAUUACCAAAUCAAAdTdT | 2200 | 4380-4398 | UUUGAUUUGGUAAUCAGUGdTdT | 2767 |
| AD-62061.1 | AUCAAAGAUGGACAUGUUAdTdT | 2201 | 4393-4411 | UAACAUGUCCAUCUUUGAUdTdT | 2768 |
| AD-62020.1 | GGACAUGUUAUUCUGCAACdTdT | 2202 | 4402-4420 | GUUGCAGAAUAACAUGUCCdTdT | 2769 |
| AD-62026.1 | UCUGCAACUGAAUUCGAUUdTdT | 2203 | 4413-4431 | AAUCGAAUUCAGUUGCAGAdTdT | 2770 |
| AD-62032.1 | GAAUUCGAUUCCCUCCAGUdTdT | 2204 | 4422-4440 | ACUGGAGGGAAUCGAAUUCdTdT | 2771 |
| AD-62038.1 | CCCUCCAGUGAUUUCCUUUdTdT | 2205 | 4432-4450 | AAAGGAAAUCACUGGAGGGdTdT | 2772 |
| AD-62044.1 | GAUUUCCUUUGUGUACGAUdTdT | 2206 | 4441-4459 | AUCGUACACAAAGGAAAUCdTdT | 2773 |
| AD-62050.1 | GUACGAUUCCGGAUAUUUGdTdT | 2207 | 4453-4471 | CAAAUAUCCGGAAUCGUACdTdT | 2774 |
| AD-62320.1 | CGGAUAUUUGAACUCUUUGdTdT | 2208 | 4462-4480 | CAAAGAGUUCAAAUAUCCGdTdT | 2775 |
| AD-62326.1 | ACUCUUUGAAGUUGGGUUUdTdT | 2209 | 4473-4491 | AAACCCAACUUCAAAGAGUdTdT | 2776 |
| AD-62332.1 | AGUUGGGUUUCUCAGUCCUdTdT | 2210 | 4482-4500 | AGGACUGAGAAACCCAACUdTdT | 2777 |
| AD-62338.1 | UUCUCAGUCCUGCCACUUUdTdT | 2211 | 4490-4508 | AAAGUGGCAGGACUGAGAAdTdT | 2778 |
| AD-62344.1 | CACUUUCACAGUGUACGAAdTdT | 2212 | 4503-4521 | UUCGUACACUGUGAAAGUGdTdT | 2779 |
| AD-62350.1 | CACAGUGUACGAAUACCACdTdT | 2213 | 4509-4527 | GUGGUAUUCGUACACUGUGdTdT | 2780 |
| AD-62356.1 | ACCACAGACCAGAUAAACAdTdT | 2214 | 4523-4541 | UGUUUAUCUGGUCUGUGGUdTdT | 2781 |
| AD-62362.1 | CCAGAUAAACAGUGUACCAdTdT | 2215 | 4531-4549 | UGGUACACUGUUUAUCUGGdTdT | 2782 |
| AD-62321.1 | CAGUGUACCAUGUUUUAUAdTdT | 2216 | 4540-4558 | UAUAAAACAUGGUACACUGdTdT | 2783 |
| AD-62327.1 | GUUUUAUAGCACUUCCAAUdTdT | 2217 | 4551-4569 | AUUGGAAGUGCUAUAAAACdTdT | 2784 |
| AD-62333.1 | CUUCCAAUAUCAAAAUUCAdTdT | 2218 | 4562-4580 | UGAAUUUUGAUAUUGGAAGdTdT | 2785 |
| AD-62339.1 | AUCAAAAUUCAGAAAGUCUdTdT | 2219 | 4570-4588 | AGACUUUCUGAAUUUUGAUdTdT | 2786 |
| AD-62345.1 | GAAAGUCUGUGAAGGAGCCdTdT | 2220 | 4581-4599 | GGCUCCUUCACAGACUUUCdTdT | 2787 |
| AD-62351.1 | GAAGGAGCCGCGUGCAAGUdTdT | 2221 | 4591-4609 | ACUUGCACGCGGCUCCUUCdTdT | 2788 |
| AD-62357.1 | CGUGCAAGUGUGUAGAAGCdTdT | 2222 | 4601-4619 | GCUUCUACACACUUGCACGdTdT | 2789 |
| AD-62363.1 | GUAGAAGCUGAUUGUGGGCdTdT | 2223 | 4612-4630 | GCCCACAAUCAGCUUCUACdTdT | 2790 |
| AD-62322.1 | CUGAUUGUGGGCAAAUGCAdTdT | 2224 | 4619-4637 | UGCAUUUGCCCACAAUCAGdTdT | 2791 |
| AD-62328.1 | GCAAAUGCAGGAAGAAUUGdTdT | 2225 | 4629-4647 | CAAUUCUUCCUGCAUUUGCdTdT | 2792 |
| AD-62334.1 | GAAGAAUUGGAUCUGACAAdTdT | 2226 | 4639-4657 | UUGUCAGAUCCAAUUCUUCdTdT | 2793 |
| AD-62340.1 | CUGACAAUCUCUGCAGAGAdTdT | 2227 | 4651-4669 | UCUCUGCAGAGAUUGUCAGdTdT | 2794 |
| AD-62346.1 | GCAGAGACAAGAAAACAAAdTdT | 2228 | 4663-4681 | UUUGUUUUCUUGUCUCUGCdTdT | 2795 |
| AD-62352.1 | CAAGAAAACAAACAGCAUGdTdT | 2229 | 4670-4688 | CAUGCUGUUUGUUUUCUUGdTdT | 2796 |
| AD-62358.1 | ACAGCAUGUAAACCAGAGAdTdT | 2230 | 4681-4699 | UCUCUGGUUUACAUGCUGUdTdT | 2797 |
| AD-62364.1 | CCAGAGAUUGCAUAUGCUUdTdT | 2231 | 4693-4711 | AAGCAUAUGCAAUCUCUGGdTdT | 2798 |
| AD-62323.1 | GCAUAUGCUUAUAAAGUUAdTdT | 2232 | 4702-4720 | UAACUUUAUAAGCAUAUGCdTdT | 2799 |
| AD-62329.1 | UUAUAAAGUUAGCAUCACAdTdT | 2233 | 4710-4728 | UGUGAUGCUAACUUUAUAAdTdT | 2800 |
| AD-62335.1 | CAUCACAUCCAUCACUGUAdTdT | 2234 | 4722-4740 | UACAGUGAUGGAUGUGAUGdTdT | 2801 |
| AD-62341.1 | UCACUGUAGAAAAUGUUUUdTdT | 2235 | 4733-4751 | AAAACAUUUUCUACAGUGAdTdT | 2802 |
| AD-62347.1 | AGAAAAUGUUUUUGUCAAGdTdT | 2236 | 4740-4758 | CUUGACAAAAACAUUUUCUdTdT | 2803 |
| AD-62353.1 | UUUGUCAAGUACAAGGCAAdTdT | 2237 | 4750-4768 | UUGCCUUGUACUUGACAAAdTdT | 2804 |
| AD-62359.1 | AGGCAACCCUUCUGGAUAUdTdT | 2238 | 4763-4781 | AUAUCCAGAAGGGUUGCCUdTdT | 2805 |
| AD-62365.1 | CCUUCUGGAUAUCUACAAAdTdT | 2239 | 4770-4788 | UUUGUAGAUAUCCAGAAGGdTdT | 2806 |
| AD-62324.1 | UAUCUACAAAACUGGGGAAdTdT | 2240 | 4779-4797 | UUCCCCAGUUUUGUAGAUAdTdT | 2807 |
| AD-62330.1 | CUGGGGAAGCUGUUGCUGAdTdT | 2241 | 4790-4808 | UCAGCAACAGCUUCCCCAGdTdT | 2808 |
| AD-62336.1 | CUGUUGCUGAGAAAGACUCdTdT | 2242 | 4799-4817 | GAGUCUUUCUCAGCAACAGdTdT | 2809 |
| AD-62342.1 | GACUCUGAGAUUACCUUCAdTdT | 2243 | 4813-4831 | UGAAGGUAAUCUCAGAGUCdTdT | 2810 |
| AD-62348.1 | GAGAUUACCUUCAUUAAAAdTdT | 2244 | 4819-4837 | UUUUAAUGAAGGUAAUCUCdTdT | 2811 |
| AD-62354.1 | AUUAAAAAGGUAACCUGUAdTdT | 2245 | 4831-4849 | UACAGGUUACCUUUUUAAUdTdT | 2812 |
| AD-62360.1 | UAACCUGUACUAACGCUGAdTdT | 2246 | 4841-4859 | UCAGCGUUAGUACAGGUUAdTdT | 2813 |
| AD-62366.1 | CUAACGCUGAGCUGGUAAAdTdT | 2247 | 4850-4868 | UUUACCAGCUCAGCGUUAGdTdT | 2814 |
| AD-62325.1 | GGUAAAAGGAAGACAGUACdTdT | 2248 | 4863-4881 | GUACUGUCUUCCUUUUACCdTdT | 2815 |
| AD-62331.1 | GAAGACAGUACUUAAUUAUdTdT | 2249 | 4871-4889 | AUAAUUAAGUACUGUCUUCdTdT | 2816 |
| AD-62337.1 | CUUAAUUAUGGGUAAAGAAdTdT | 2250 | 4881-4899 | UUCUUUACCCAUAAUUAAGdTdT | 2817 |
| AD-62343.1 | UAAAGAAGCCCUCCAGAUAdTdT | 2251 | 4893-4911 | UAUCUGGAGGGCUUCUUUAdTdT | 2818 |
| AD-62349.1 | CCUCCAGAUAAAAUACAAUdTdT | 2252 | 4902-4920 | AUUGUAUUUUAUCUGGAGGdTdT | 2819 |
| AD-62355.1 | AAAUACAAUUUCAGUUUCAdTdT | 2253 | 4912-4930 | UGAAACUGAAAUUGUAUUUdTdT | 2820 |
| AD-62361.1 | CAGUUUCAGGUACAUCUACdTdT | 2254 | 4923-4941 | GUAGAUGUACCUGAAACUGdTdT | 2821 |
| AD-62367.1 | GGUACAUCUACCCUUUAGAdTdT | 2255 | 4931-4949 | UCUAAAGGGUAGAUGUACCdTdT | 2822 |
| AD-62373.1 | CCUUUAGAUUCCUUGACCUdTdT | 2256 | 4942-4960 | AGGUCAAGGAAUCUAAAGGdTdT | 2823 |
| AD-62379.1 | CCUUGACCUGGAUUGAAUAdTdT | 2257 | 4952-4970 | UAUUCAAUCCAGGUCAAGGdTdT | 2824 |
| AD-62385.1 | GGAUUGAAUACUGGCCUAGdTdT | 2258 | 4961-4979 | CUAGGCCAGUAUUCAAUCCdTdT | 2825 |
| AD-62391.1 | CUGGCCUAGAGACACAACAdTdT | 2259 | 4971-4989 | UGUUGUGUCUCUAGGCCAGdTdT | 2826 |
| AD-62397.1 | GAGACACAACAUGUUCAUCdTdT | 2260 | 4979-4997 | GAUGAACAUGUUGUGUCUCdTdT | 2827 |
| AD-62403.1 | GUUCAUCGUGUCAAGCAUUdTdT | 2261 | 4991-5009 | AAUGCUUGACACGAUGAACdTdT | 2828 |
| AD-62409.1 | GUCAAGCAUUUUUAGCUAAdTdT | 2262 | 5000-5018 | UUAGCUAAAAAUGCUUGACdTdT | 2829 |
| AD-62368.1 | AGCUAAUUUAGAUGAAUUUdTdT | 2263 | 5013-5031 | AAAUUCAUCUAAAUUAGCUdTdT | 2830 |
| AD-62374.1 | AGAUGAAUUUGCCGAAGAUdTdT | 2264 | 5022-5040 | AUCUUCGGCAAAUUCAUCUdTdT | 2831 |
| AD-62380.1 | CCGAAGAUAUCUUUUUAAAdTdT | 2265 | 5033-5051 | UUUAAAAAGAUAUCUUCGGdTdT | 2832 |
| AD-62386.1 | CUUUUUAAAUGGAUGCUAAdTdT | 2266 | 5043-5061 | UUAGCAUCCAUUUAAAAAGdTdT | 2833 |
| AD-62392.1 | GGAUGCUAAAAUUCCUGAAdTdT | 2267 | 5053-5071 | UUCAGGAAUUUUAGCAUCCdTdT | 2834 |
| AD-62398.1 | UAAAAUUCCUGAAGUUCAGdTdT | 2268 | 5059-5077 | CUGAACUUCAGGAAUUUUAdTdT | 2835 |
| AD-62404.1 | AGUUCAGCUGCAUACAGUUdTdT | 2269 | 5071-5089 | AACUGUAUGCAGCUGAACUdTdT | 2836 |
| AD-62410.1 | GCAUACAGUUUGCACUUAUdTdT | 2270 | 5080-5098 | AUAAGUGCAAACUGUAUGCdTdT | 2837 |
| AD-62369.1 | ACUUAUGGACUCCUGUUGUdTdT | 2271 | 5093-5111 | ACAACAGGAGUCCAUAAGUdTdT | 2838 |
| AD-62375.1 | GGACUCCUGUUGUUGAAGUdTdT | 2272 | 5099-5117 | ACUUCAACAACAGGAGUCCdTdT | 2839 |
| AD-62381.1 | UGUUGAAGUUCGUUUUUUUdTdT | 2273 | 5109-5127 | AAAAAAACGAACUUCAACAdTdT | 2840 |
| AD-62387.1 | UUUUUUGUUUUCUUCUUUUdTdT | 2274 | 5122-5140 | AAAAGAAGAAAACAAAAAAdTdT | 2841 |
| AD-62393.1 | UCUUCUUUUUUUAAACAUUdTdT | 2275 | 5132-5150 | AAUGUUUAAAAAAAGAAGAdTdT | 2842 |
| AD-62399.1 | UUUUUAAACAUUCAUAGCUdTdT | 2276 | 5139-5157 | AGCUAUGAAUGUUUAAAAAdTdT | 2843 |
| AD-62405.1 | AUAGCUGGUCUUAUUUGUAdTdT | 2277 | 5152-5170 | UACAAAUAAGACCAGCUAUdTdT | 2844 |
| AD-62411.1 | GUCUUAUUUGUAAAGCUCAdTdT | 2278 | 5159-5177 | UGAGCUUUACAAAUAAGACdTdT | 2845 |
| AD-62370.1 | AAAGCUCACUUUACUUAGAdTdT | 2279 | 5170-5188 | UCUAAGUAAAGUGAGCUUUdTdT | 2846 |
| AD-62376.1 | ACUUAGAAUUAGUGGCACUdTdT | 2280 | 5182-5200 | AGUGCCACUAAUUCUAAGUdTdT | 2847 |
| AD-62382.1 | AGUGGCACUUGCUUUUAUUdTdT | 2281 | 5192-5210 | AAUAAAAGCAAGUGCCACUdTdT | 2848 |
| AD-62388.1 | GCUUUUAUUAGAGAAUGAUdTdT | 2282 | 5202-5220 | AUCAUUCUCUAAUAAAAGCdTdT | 2849 |
| AD-62394.1 | GAGAAUGAUUUCAAAUGCUdTdT | 2283 | 5212-5230 | AGCAUUUGAAAUCAUUCUCdTdT | 2850 |
| AD-62400.1 | UUUCAAAUGCUGUAACUUUdTdT | 2284 | 5220-5238 | AAAGUUACAGCAUUUGAAAdTdT | 2851 |
| AD-62406.1 | GUAACUUUCUGAAAUAACAdTdT | 2285 | 5231-5249 | UGUUAUUUCAGAAAGUUACdTdT | 2852 |
| AD-62412.1 | GAAAUAACAUGGCCUUGGAdTdT | 2286 | 5241-5259 | UCCAAGGCCAUGUUAUUUCdTdT | 2853 |
| AD-62371.1 | CCUUGGAGGGCAUGAAGACdTdT | 2287 | 5253-5271 | GUCUUCAUGCCCUCCAAGGdTdT | 2854 |
| AD-62377.1 | AGGGCAUGAAGACAGAUACdTdT | 2288 | 5259-5277 | GUAUCUGUCUUCAUGCCCUdTdT | 2855 |
| AD-62383.1 | GAUACUCCUCCAAGGUUAUdTdT | 2289 | 5273-5291 | AUAACCUUGGAGGAGUAUCdTdT | 2856 |
| AD-62389.1 | CCUCCAAGGUUAUUGGACAdTdT | 2290 | 5279-5297 | UGUCCAAUAACCUUGGAGGdTdT | 2857 |
| AD-62395.1 | GGACACCGGAAACAAUAAAdTdT | 2291 | 5293-5311 | UUUAUUGUUUCCGGUGUCCdTdT | 2858 |
| AD-62401.1 | GAAACAAUAAAUUGGAACAdTdT | 2292 | 5301-5319 | UGUUCCAAUUUAUUGUUUCdTdT | 2859 |
| AD-62407.1 | AUUGGAACACCUCCUCAAAdTdT | 2293 | 5311-5329 | UUUGAGGAGGUGUUCCAAUdTdT | 2860 |
| AD-62413.1 | UCCUCAAACCUACCACUCAdTdT | 2294 | 5322-5340 | UGAGUGGUAGGUUUGAGGAdTdT | 2861 |
| AD-62372.1 | CUACCACUCAGGAAUGUUUdTdT | 2295 | 5331-5349 | AAACAUUCCUGAGUGGUAGdTdT | 2862 |
| AD-62378.1 | AAUGUUUGCUGGGGCCGAAdTdT | 2296 | 5343-5361 | UUCGGCCCCAGCAAACAUUdTdT | 2863 |
| AD-62384.1 | UGCUGGGGCCGAAAGAACAdTdT | 2297 | 5349-5367 | UGUUCUUUCGGCCCCAGCAdTdT | 2864 |
| AD-62390.1 | AAAGAACAGUCCAUUGAAAdTdT | 2298 | 5360-5378 | UUUCAAUGGACUGUUCUUUdTdT | 2865 |
| AD-62396.1 | CAUUGAAAGGGAGUAUUACdTdT | 2299 | 5371-5389 | GUAAUACUCCCUUUCAAUGdTdT | 2866 |
| AD-62402.1 | GGAGUAUUACAAAAACAUGdTdT | 2300 | 5380-5398 | CAUGUUUUUGUAAUACUCCdTdT | 2867 |
| AD-62408.1 | AAAACAUGGCCUUUGCUUGdTdT | 2301 | 5391-5409 | CAAGCAAAGGCCAUGUUUUdTdT | 2868 |
| AD-62414.1 | GCCUUUGCUUGAAAGAAAAdTdT | 2302 | 5399-5417 | UUUUCUUUCAAGCAAAGGCdTdT | 2869 |
| AD-62415.1 | GAAAGAAAAUACCAAGGAAdTdT | 2303 | 5409-5427 | UUCCUUGGUAUUUUCUUUCdTdT | 2870 |
| AD-62416.1 | CCAAGGAACAGGAAACUGAdTdT | 2304 | 5420-5438 | UCAGUUUCCUGUUCCUUGGdTdT | 2871 |
| AD-62417.1 | AACUGAUCAUUAAAGCCUGdTdT | 2305 | 5433-5451 | CAGGCUUUAAUGAUCAGUUdTdT | 2872 |

TABLE 22
C5 single dose screen (10 mM) in Hep3B
cells with dT modified iRNAs

| Duplex ID | Avg. % message remaining |
|---|---|
| AD-61779.2 | 43.2 |
| AD-61785.2 | 22.5 |
| AD-61791.2 | 27.3 |
| AD-61797.2 | 30.5 |
| AD-61803.2 | 30.9 |
| AD-61809.2 | 75.1 |
| AD-61815.2 | 90.7 |
| AD-61821.2 | 33.7 |
| AD-61780.2 | 53.5 |
| AD-61786.2 | 34.4 |
| AD-61792.2 | 27.5 |
| AD-61798.2 | 23.3 |
| AD-61804.2 | 23.6 |
| AD-61810.2 | 33.4 |
| AD-61816.2 | 39.7 |
| AD-61822.2 | 24.9 |
| AD-61781.2 | 31.2 |
| AD-61787.2 | 22.8 |
| AD-61793.2 | 28.4 |
| AD-61799.2 | 91 |
| AD-61805.2 | 22.1 |
| AD-61811.2 | 90.9 |
| AD-61817.2 | 26.1 |
| AD-61823.2 | 41.3 |
| AD-61782.2 | 42.5 |
| AD-61788.2 | 28.9 |
| AD-61794.2 | 133.5 |
| AD-61800.2 | 27.9 |
| AD-61806.2 | 42.8 |
| AD-61812.2 | 26.9 |
| AD-61818.2 | 30.6 |
| AD-61824.2 | 29.3 |
| AD-61783.2 | 61.3 |
| AD-61789.2 | 25.5 |
| AD-61795.2 | 34.2 |
| AD-61801.2 | 24.2 |
| AD-61807.2 | 42.8 |
| AD-61813.2 | 31 |
| AD-61819.2 | 42.2 |
| AD-61825.2 | 31 |
| AD-61784.2 | 34.1 |
| AD-61790.2 | 26.8 |
| AD-61796.2 | 34.6 |
| AD-61802.2 | 30 |
| AD-61808.2 | 23.5 |
| AD-61814.2 | 45.3 |
| AD-61820.2 | 56 |
| AD-61826.2 | 31.6 |
| AD-61832.2 | 36.2 |
| AD-61838.2 | 39.7 |
| AD-61844.2 | 37 |
| AD-61850.2 | 66.3 |
| AD-61856.2 | 172.6 |
| AD-61862.2 | 41.3 |
| AD-61868.2 | 32.2 |
| AD-61827.2 | 52.7 |
| AD-61833.2 | 29.6 |
| AD-61839.2 | 41.5 |
| AD-61845.2 | 29.7 |
| AD-61851.2 | 37 |
| AD-61857.2 | 34.9 |
| AD-61863.2 | 33.3 |
| AD-61869.2 | 38.2 |
| AD-61828.2 | 30.3 |
| AD-61834.2 | 27.1 |
| AD-61840.2 | 64.3 |
| AD-61846.2 | 42 |
| AD-61852.2 | 25.2 |
| AD-61858.2 | 96.7 |
| AD-61864.2 | 29.6 |
| AD-61870.2 | 30.5 |
| AD-61829.2 | 92.7 |
| AD-61835.2 | 24.8 |
| AD-61841.2 | 59.2 |
| AD-61847.2 | 30.9 |
| AD-61853.2 | 35.2 |
| AD-61859.2 | 40.1 |
| AD-61865.2 | 42.3 |
| AD-61871.2 | 55.8 |
| AD-61830.2 | 162.9 |
| AD-61836.2 | 28.8 |
| AD-61842.2 | 18.2 |
| AD-61848.2 | 25 |
| AD-61854.2 | 42.3 |
| AD-61860.2 | 41.7 |
| AD-61866.2 | 28.9 |
| AD-61872.2 | 64.7 |
| AD-61831.2 | 16.9 |
| AD-61837.2 | 24.9 |
| AD-61843.2 | 27.5 |
| AD-61849.2 | 25.8 |
| AD-61855.2 | 20 |
| AD-61861.2 | 28.6 |
| AD-61867.2 | 18 |
| AD-62062.1 | 22 |
| AD-62068.1 | 29.9 |
| AD-62074.1 | 40.2 |
| AD-62080.1 | 30.4 |
| AD-62086.1 | 21 |
| AD-62092.1 | 20 |
| AD-62098.1 | 38.4 |
| AD-62104.1 | 42.7 |
| AD-62063.1 | 26.6 |
| AD-62069.1 | 55.6 |
| AD-62075.1 | 114.4 |
| AD-62081.1 | 21.2 |
| AD-62087.1 | 33.8 |
| AD-62093.1 | 26.3 |
| AD-62099.1 | 23.9 |
| AD-62105.1 | 30.1 |
| AD-62064.1 | 32 |
| AD-62070.1 | 135.7 |
| AD-62076.1 | 84.3 |
| AD-62082.1 | 42.3 |
| AD-62088.1 | 36.5 |
| AD-62094.1 | 66 |
| AD-62100.1 | 66.4 |
| AD-62106.1 | 33.9 |
| AD-62065.1 | 33 |
| AD-62071.1 | 38.4 |
| AD-62077.1 | 27.8 |
| AD-62083.1 | 44.7 |
| AD-62089.1 | 42.7 |
| AD-62095.1 | 46.6 |
| AD-62101.1 | 35.3 |
| AD-62107.1 | 29.9 |
| AD-62066.1 | 33.5 |
| AD-62072.1 | 27.5 |
| AD-62078.1 | 49.9 |
| AD-62084.1 | 117.6 |
| AD-62090.1 | 44 |
| AD-62096.1 | 33.5 |
| AD-62102.1 | 39.2 |
| AD-62108.1 | 69.5 |
| AD-62067.1 | 32.3 |
| AD-62073.1 | 81.1 |
| AD-62079.1 | 46.8 |
| AD-62085.1 | 31.6 |
| AD-62091.1 | 32 |
| AD-62097.1 | 35.3 |
| AD-62103.1 | 35.6 |
| AD-62109.1 | 24.7 |
| AD-62115.1 | 25.7 |
| AD-62121.1 | 23.1 |
| AD-62127.1 | 36.3 |
| AD-62133.1 | 50.9 |
| AD-62139.1 | 84.1 |
| AD-62145.1 | 90.8 |
| AD-62151.1 | 56.9 |
| AD-62110.1 | 26 |
| AD-62116.1 | 145.5 |
| AD-62122.1 | 198.7 |
| AD-62128.1 | 178.4 |
| AD-62134.1 | 52.4 |
| AD-62140.1 | 55.6 |
| AD-62146.1 | 47.2 |
| AD-62152.1 | 16.4 |
| AD-62111.1 | 49.3 |
| AD-62117.1 | 46.2 |
| AD-62123.1 | 95.1 |
| AD-62129.1 | 156.2 |
| AD-62135.1 | 62 |
| AD-62141.1 | 128.1 |
| AD-62147.1 | 146.2 |
| AD-62153.1 | 35.5 |
| AD-62112.1 | 43 |
| AD-62118.1 | 32 |
| AD-62124.1 | 48.4 |
| AD-62130.1 | 49.4 |
| AD-62136.1 | 141.9 |
| AD-62142.1 | 38.7 |
| AD-62148.1 | 165.2 |
| AD-62154.1 | 94.7 |
| AD-62113.1 | 52.5 |
| AD-62119.1 | 44 |
| AD-62125.1 | 129.9 |
| AD-62131.1 | 68.9 |
| AD-62137.1 | 106 |
| AD-62143.1 | 176.1 |
| AD-62149.1 | 201.3 |
| AD-62155.1 | 143.3 |
| AD-62114.1 | 22.8 |
| AD-62120.1 | 34.6 |
| AD-62126.1 | 44.6 |
| AD-62132.1 | 39.5 |
| AD-62138.1 | 34.5 |
| AD-62144.1 | 28 |
| AD-62150.1 | 22.1 |
| AD-62156.1 | 44.1 |
| AD-62162.1 | 19.8 |
| AD-62168.1 | 17.3 |
| AD-62174.1 | 27 |
| AD-62180.1 | 15.8 |
| AD-62186.1 | 20.5 |
| AD-62192.1 | 33.9 |
| AD-62198.1 | 14 |
| AD-62157.1 | 19.3 |
| AD-62163.1 | 15.4 |
| AD-62169.1 | 23.6 |
| AD-62175.1 | 29.6 |
| AD-62181.1 | 26.4 |
| AD-62187.1 | 28.8 |
| AD-62193.1 | 22.9 |
| AD-62199.1 | 16.4 |
| AD-62158.1 | 18.5 |
| AD-62164.1 | 19.1 |
| AD-62170.1 | 15 |
| AD-62176.1 | 62.7 |
| AD-62182.1 | 70.8 |
| AD-62188.1 | 81.1 |
| AD-62194.1 | 63.6 |
| AD-62200.1 | 21.6 |
| AD-62159.1 | 42.8 |
| AD-62165.1 | 27.7 |
| AD-62171.1 | 31.9 |
| AD-62177.1 | 29.6 |
| AD-62183.1 | 25.2 |
| AD-62189.1 | 32.7 |
| AD-62195.1 | 73.1 |
| AD-62201.1 | 35.6 |
| AD-62160.1 | 56.5 |
| AD-62166.1 | 115.1 |
| AD-62172.1 | 107.4 |
| AD-62178.1 | 71.3 |
| AD-62184.1 | 27.2 |
| AD-62190.1 | 37.2 |
| AD-62196.1 | 19.5 |
| AD-62202.1 | 19.4 |
| AD-62161.1 | 23.7 |
| AD-62167.1 | 24.4 |
| AD-62173.1 | 36 |
| AD-62179.1 | 50.5 |
| AD-62185.1 | 40.5 |
| AD-62191.1 | 39.3 |
| AD-62197.1 | 39.4 |
| AD-62203.1 | 34.1 |
| AD-62209.1 | 34.6 |
| AD-62215.1 | 31 |
| AD-62221.1 | 16.3 |
| AD-62227.1 | 68.5 |
| AD-62233.1 | 34.3 |
| AD-62239.1 | 37.2 |
| AD-62245.1 | 31.2 |
| AD-62204.1 | 33 |
| AD-62210.1 | 29 |
| AD-62216.1 | 38.7 |
| AD-62222.1 | 34.5 |
| AD-62228.1 | 30.3 |
| AD-62234.1 | 15.2 |
| AD-62240.1 | 26.2 |
| AD-62246.1 | 40.4 |
| AD-62205.1 | 17.1 |
| AD-62211.1 | 20.9 |
| AD-62217.1 | 49.8 |
| AD-62223.1 | 40 |
| AD-62229.1 | 26.7 |
| AD-62235.1 | 21.5 |
| AD-62241.1 | 46.2 |
| AD-62247.1 | 40.4 |
| AD-62206.1 | 42.2 |
| AD-62212.1 | 51.7 |
| AD-62218.1 | 26 |
| AD-62224.1 | 40.3 |
| AD-62230.1 | 32.8 |
| AD-62236.1 | 52.4 |
| AD-62242.1 | 33.1 |
| AD-62248.1 | 18 |
| AD-62207.1 | 19.7 |
| AD-62213.1 | 43.4 |
| AD-62219.1 | 39.8 |
| AD-62225.1 | 34.3 |
| AD-62231.1 | 37.2 |
| AD-62237.1 | 25.9 |
| AD-62243.1 | 19.8 |
| AD-62249.1 | 13.8 |
| AD-62208.1 | 13.7 |
| AD-62214.1 | 16.6 |
| AD-62220.1 | 25.2 |
| AD-62226.1 | 27 |
| AD-62232.1 | 36.5 |
| AD-62238.1 | 51.5 |
| AD-62244.1 | 31.5 |
| AD-61874.1 | 27.1 |
| AD-61880.1 | 30.8 |
| AD-61886.1 | 30.4 |
| AD-61892.1 | 48.9 |
| AD-61898.1 | 24.7 |
| AD-61904.1 | 125.9 |
| AD-61910.1 | 45.7 |
| AD-61916.1 | 25.7 |
| AD-61875.1 | 33.4 |
| AD-61881.1 | 64 |
| AD-61887.1 | 36.7 |
| AD-61893.1 | 22.9 |
| AD-61899.1 | 84.5 |
| AD-61905.1 | 32.1 |
| AD-61911.1 | 23.7 |
| AD-61917.1 | 22.1 |
| AD-61876.1 | 47.3 |
| AD-61882.1 | 26.5 |
| AD-61888.1 | 27.7 |
| AD-61894.1 | 64.8 |
| AD-61900.1 | 89.8 |
| AD-61906.1 | 22.4 |
| AD-61912.1 | 19.8 |
| AD-61918.1 | 37.1 |
| AD-61877.1 | 145 |
| AD-61883.1 | 31.5 |
| AD-61889.1 | 33.9 |
| AD-61895.1 | 37.5 |
| AD-61901.1 | 26.1 |
| AD-61907.1 | 33 |
| AD-61913.1 | 33.1 |
| AD-61919.1 | 36.6 |
| AD-61878.1 | 26.9 |
| AD-61884.1 | 33.9 |
| AD-61890.1 | 37.2 |
| AD-61896.1 | 41.7 |
| AD-61902.1 | 58.6 |
| AD-61908.1 | 28 |
| AD-61914.1 | 31.4 |
| AD-61920.1 | 27.1 |
| AD-61879.1 | 33.1 |
| AD-61885.1 | 33.7 |
| AD-61891.1 | 41.3 |
| AD-61897.1 | 39.4 |
| AD-61903.1 | 51.5 |
| AD-61909.1 | 48.6 |
| AD-61915.1 | 122.4 |
| AD-61921.1 | 66.4 |
| AD-61927.1 | 40.5 |
| AD-61933.1 | 27.7 |
| AD-61939.1 | 28.1 |
| AD-61945.1 | 30 |
| AD-61951.1 | 33.7 |
| AD-61957.1 | 32.6 |
| AD-61963.1 | 17 |
| AD-61922.1 | 32.9 |
| AD-61928.1 | 28.3 |
| AD-61934.1 | 24 |
| AD-61940.1 | 28.2 |
| AD-61946.1 | 33.2 |
| AD-61952.1 | 167.9 |
| AD-61958.1 | 37 |
| AD-61964.1 | 30.6 |
| AD-61923.1 | 51.2 |
| AD-61929.1 | 29.4 |
| AD-61935.1 | 61 |
| AD-61941.1 | 29.5 |
| AD-61947.1 | 28.9 |
| AD-61953.1 | 23.7 |
| AD-61959.1 | 18.9 |
| AD-61965.1 | 17 |
| AD-61924.1 | 24.1 |
| AD-61930.1 | 31.9 |
| AD-61936.1 | 36.9 |
| AD-61942.1 | 13.8 |
| AD-61948.1 | 40.2 |
| AD-61954.1 | 41.8 |
| AD-61960.1 | 24.1 |
| AD-61966.1 | 18.9 |
| AD-61925.1 | 52.4 |
| AD-61931.1 | 25.8 |
| AD-61937.1 | 19.1 |
| AD-61943.1 | 27.8 |
| AD-61949.1 | 26.5 |
| AD-61955.1 | 83.8 |
| AD-61961.1 | 26 |
| AD-61967.1 | 16.3 |
| AD-61926.1 | 17.8 |
| AD-61932.1 | 18.6 |
| AD-61938.1 | 31.9 |
| AD-61944.1 | 29.5 |
| AD-61950.1 | 57.8 |
| AD-61956.1 | 42.1 |
| AD-61962.1 | 30 |
| AD-61968.1 | 29.1 |
| AD-61974.1 | 50.8 |
| AD-61980.1 | 19.7 |
| AD-61986.1 | 36.4 |
| AD-61992.1 | 36.3 |
| AD-61998.1 | 18.3 |
| AD-62004.1 | 14 |
| AD-62010.1 | 56.8 |
| AD-61969.1 | 30 |
| AD-61975.1 | 51.1 |
| AD-61981.1 | 37.6 |
| AD-61987.1 | 32.5 |
| AD-61993.1 | 23.4 |
| AD-61999.1 | 43.8 |
| AD-62005.1 | 23.8 |
| AD-62011.1 | 32.7 |
| AD-61970.1 | 39.6 |
| AD-61976.1 | 27.5 |
| AD-61982.1 | 64.9 |
| AD-61988.1 | 29.5 |
| AD-61994.1 | 40.5 |
| AD-62006.1 | 42.1 |
| AD-62012.1 | 21 |
| AD-61971.1 | 27.1 |
| AD-61977.1 | 23.4 |
| AD-61983.1 | 57.5 |
| AD-61989.1 | 25.8 |
| AD-61995.1 | 18.2 |
| AD-62001.1 | 29.7 |
| AD-62007.1 | 106.4 |
| AD-62013.1 | 36.1 |
| AD-61972.1 | 40.5 |
| AD-61978.1 | 49.1 |
| AD-61984.1 | 24.3 |
| AD-61990.1 | 38.8 |
| AD-61996.1 | 40.5 |
| AD-62002.1 | 32.5 |
| AD-62008.1 | 35.3 |
| AD-62014.1 | 23.6 |
| AD-61973.1 | 39.3 |
| AD-61979.1 | 27.4 |
| AD-61985.1 | 31.3 |
| AD-61991.1 | 34.9 |
| AD-61997.1 | 29.2 |
| AD-62003.1 | 25.9 |
| AD-62009.1 | 21.1 |
| AD-62056.1 | 16.3 |
| AD-62015.1 | 139.3 |
| AD-62021.1 | 36.4 |
| AD-62027.1 | 42.4 |
| AD-62033.1 | 62 |
| AD-62039.1 | 35.2 |
| AD-62045.1 | 30.8 |
| AD-62051.1 | 22.9 |
| AD-62057.1 | 31.8 |
| AD-62016.1 | 29.2 |
| AD-62022.1 | 36.9 |
| AD-62028.1 | 52.6 |
| AD-62034.1 | 31 |
| AD-62040.1 | 30.7 |
| AD-62046.1 | 28.2 |
| AD-62052.1 | 23.7 |
| AD-62058.1 | 77.9 |
| AD-62017.1 | 41 |
| AD-62023.1 | 27 |
| AD-62029.1 | 31.8 |
| AD-62035.1 | 46.4 |
| AD-62041.1 | 25.3 |
| AD-62047.1 | 20 |
| AD-62053.1 | 37.1 |
| AD-62059.1 | 31 |
| AD-62018.1 | 37.8 |
| AD-62024.1 | 34.7 |
| AD-62030.1 | 50.4 |
| AD-62036.1 | 25.5 |
| AD-62042.1 | 32.5 |
| AD-62048.1 | 28.3 |
| AD-62054.1 | 55.6 |
| AD-62060.1 | 26.9 |
| AD-62019.1 | 29 |
| AD-62025.1 | 78.5 |
| AD-62031.1 | 152.8 |
| AD-62037.1 | 27.3 |
| AD-62043.1 | 33.8 |
| AD-62049.1 | 46 |
| AD-62055.1 | 24.5 |
| AD-62061.1 | 30.5 |
| AD-62020.1 | 25.1 |
| AD-62026.1 | 24.9 |
| AD-62032.1 | 23 |
| AD-62038.1 | 21.2 |
| AD-62044.1 | 34.1 |
| AD-62050.1 | 22.4 |
| AD-62320.1 | 16.6 |
| AD-62326.1 | 16.6 |
| AD-62332.1 | 15.4 |
| AD-62338.1 | 41.9 |
| AD-62344.1 | 19.6 |
| AD-62350.1 | 32.3 |
| AD-62356.1 | 20.4 |
| AD-62362.1 | 27.8 |
| AD-62321.1 | 18.7 |
| AD-62327.1 | 14.8 |
| AD-62333.1 | 22.2 |
| AD-62339.1 | 134.5 |
| AD-62345.1 | 32.1 |
| AD-62351.1 | 35.6 |
| AD-62357.1 | 31 |
| AD-62363.1 | 28.2 |
| AD-62322.1 | 45.1 |
| AD-62328.1 | 30.1 |
| AD-62334.1 | 39.1 |
| AD-62340.1 | 24.3 |
| AD-62346.1 | 35.4 |
| AD-62352.1 | 33.8 |
| AD-62358.1 | 45.7 |
| AD-62364.1 | 19.7 |
| AD-62323.1 | 40.5 |
| AD-62329.1 | 57.5 |
| AD-62335.1 | 27.6 |
| AD-62341.1 | 69.2 |
| AD-62347.1 | 125.9 |
| AD-62353.1 | 53.1 |
| AD-62359.1 | 38.1 |
| AD-62365.1 | 23.6 |
| AD-62324.1 | 27.1 |
| AD-62330.1 | 25.1 |
| AD-62336.1 | 25.3 |
| AD-62342.1 | 45.4 |
| AD-62348.1 | 91.6 |
| AD-62354.1 | 132.1 |
| AD-62360.1 | 31.6 |
| AD-62366.1 | 14.2 |
| AD-62325.1 | 27.9 |
| AD-62331.1 | 31.5 |
| AD-62337.1 | 33.9 |
| AD-62343.1 | 36.1 |
| AD-62349.1 | 37.6 |
| AD-62355.1 | 38.8 |
| AD-62361.1 | 46.1 |
| AD-62367.1 | 23.6 |
| AD-62373.1 | 32.1 |
| AD-62379.1 | 29.6 |
| AD-62385.1 | 35.7 |
| AD-62391.1 | 33.7 |
| AD-62397.1 | 54.1 |
| AD-62403.1 | 34.8 |
| AD-62409.1 | 28.2 |
| AD-62368.1 | 29.7 |
| AD-62374.1 | 29.6 |
| AD-62380.1 | 30.6 |
| AD-62386.1 | 23.4 |
| AD-62392.1 | 30.5 |
| AD-62398.1 | 48.7 |
| AD-62404.1 | 24.8 |
| AD-62410.1 | 21.9 |
| AD-62369.1 | 27.4 |
| AD-62375.1 | 31.9 |
| AD-62381.1 | 27.3 |
| AD-62387.1 | 77 |
| AD-62393.1 | 93.3 |
| AD-62399.1 | 150.2 |
| AD-62405.1 | 28.5 |
| AD-62411.1 | 19.4 |
| AD-62370.1 | 16.3 |
| AD-62376.1 | 48.2 |
| AD-62382.1 | 28.5 |
| AD-62388.1 | 49.9 |
| AD-62394.1 | 29.9 |
| AD-62400.1 | 45.2 |
| AD-62406.1 | 23 |
| AD-62412.1 | 45.5 |
| AD-62371.1 | 66.5 |
| AD-62377.1 | 49.5 |
| AD-62383.1 | 73.8 |
| AD-62389.1 | 82.4 |
| AD-62395.1 | 31.8 |
| AD-62401.1 | 31.2 |
| AD-62407.1 | 30.2 |
| AD-62413.1 | 28.1 |
| AD-62372.1 | 43 |
| AD-62378.1 | 17.9 |
| AD-62384.1 | 29.6 |
| AD-62390.1 | 37.7 |
| AD-62396.1 | 26 |
| AD-62402.1 | 31.6 |
| AD-62408.1 | 46.6 |
| AD-62414.1 | 27.2 |
| AD-62415.1 | 17.6 |
| AD-62416.1 | 25.3 |
| AD-62417.1 | 36.3 |
| AD-61779.2 | 43.2 |
| AD-61785.2 | 22.5 |
| AD-61791.2 | 27.3 |
| AD-61797.2 | 30.5 |
| AD-61803.2 | 30.9 |
| AD-61809.2 | 75.1 |
| AD-61815.2 | 90.7 |
| AD-61821.2 | 33.7 |
| AD-61780.2 | 53.5 |
| AD-61786.2 | 34.4 |
| AD-61792.2 | 27.5 |
| AD-61798.2 | 23.3 |
| AD-61804.2 | 23.6 |

### Example 7: In Vivo Screening of Additional siRNAs

[0733] Based on the sequence of AD-58643, an additional four sense and three antisense sequences were synthesized and used to prepare twelve, 21/25 mer compounds (Table 23). In general, the antisense strands of these compounds were extended with a dTdT and the duplexes had fewer fluoro-modified nucleotides.

[0734] C57BL/6 mice (N=3 per group) were injected subcutaneously with 1 mg/kg of these GalNAc conjugated duplexes, serum was collected on day 0 pre-bleed, and day 5, and the levels of C5 proteins were quantified by ELISA. C5 protein levels were normalized to the day 0 pre-bleed level.

[0735] FIG. 14 shows the results of an in vivo single dose screen with the indicated iRNAs. Data are expressed as percent of C5 protein remaining relative to pre-bleed levels. Those iRNAs having improved efficacy as compared to the parent compound included AD-62510, AD-62643, AD-62645, AD-62646, AD-62650, and AD-62651. These iRNAs also demonstrated similar potencies (IC₅₀ of about 23-59 pM).

[0736] The efficacy of these iRNAs was also tested in C57Bl/6 mice using a single-dosing administration protocol. Mice were subcutaneously administered AD-62510, AD-62643, AD-62645, AD-62646, AD-62650, and AD-62651 at a 0.25 mg/kg, 0.5 mg/kg, 1.0 mg/kg, or 2.5 mg/kg dose. Serum was collected at days 0 and 5 and analyzed for C5 protein levels by ELISA. C5 levels were normalized to the day 0 pre-bleed level.

[0737] FIG. 15 shows that there is a dose response with all of the tested iRNAs and that single-dosing of all of these iRNAs achieved silencing of C5 protein similar to or better than AD-58641.

[0738] The duration of silencing of AD-62510, AD-62643, AD-62645, AD-62646, AD-62650, and AD-62651 in vivo was determined by administering a single 1.0 mg/kg dose to C57Bl/6 mice and determining the amount of C5 protein present on days 6, 13, 20, 27, and 34 by ELISA. C5 levels were normalized to the day 0 pre-bleed level.

[0739] As demonstrated in FIG. 16, each of the iRNAs tested has the same recovery kinetics as AD-62643 trending toward the best silencing, but within the error of the assay.

[0740] AD-62510, AD-62643, AD-62645, AD-62646, AD-62650, and AD-62651 were further tested for efficacy and to evaluate the cumulative effect of the iRNAs in rats using a repeat administration protocol. Wild-type Sprague Dawley rats were subcutaneously injected with each of the iRNAs at a 5.0 mg/kg/dose on days 0, 4, and 7. Serum was collected on days 0, 4, 7, 11, 14, 18, 25, 28, and 32. Serum hemolytic activity was quantified as described above.

[0741] The results depicted in FIG. 17 demonstrate that all of the tested iRNAs have a potent and durable decrease in hemolytic activity and a similar recovery of hemolysis to that observed with AD-58641 treatment.

TABLE 23
Modified Sense and Antisense Strand Sequences of GalNAc-Conjugated C5 dsRNAs.

| | | | SEQ | | | SEQ |
|---|---|---|---|---|---|---|
| | | | ID | | | ID |
| Duplex ID | sense ID | Sense (5′ to 3′) | NO: | AS ID | Antisense (5′ to 3′) | NO: |
| AD-58643 | A-119326.1 | AfsasGfcAfaGfaUfAfUfuUfu | 2873 | A-119327.1 | usAfsuUfaUfaAfaAfauaUfc | 2886 |
| | | UfaUfaAfuAfL96 | | | UfuGfcUfususu | |
| AD-62642 | A-125167.7 | asasGfcAfaGfaUfAfUfuUfuu | 2874 | A-125139.1 | usAfsuuaUfaAfaAfauaUfcU | 2887 |
| | | AfuAfauaL96 | | | fuGfcuususudTdT | |
| AD-62510 | A-125167.7 | asasGfcAfaGfaUfAfUfuUfuu | 2875 | A-125173.2 | usAfsUfuAfuAfAfaAfauaUf | 2888 |
| | | AfuAfauaL96 | | | cUfuGfcuususudTdT | |
| AD-62643 | A-125167.7 | asasGfcAfaGfaUfAfUfuUfuu | 2876 | A-125647.1 | usAfsUfuAfuaAfaAfauaUfc | 2889 |
| | | AfuAfauaL96 | | | UfuGfcuususudTdT | |
| AD-62644 | A-125157.17 | asasGfcAfaGfaUfAfUfuUfuu | 2877 | A-125139.1 | usAfsuuaUfaAfaAfauaUfcU | 2890 |
| | | AfuaAfuaL96 | | | fuGfcuususudTdT | |
| AD-62645 | A-125157.17 | asasGfcAfaGfaUfAfUfuUfuu | 2878 | A-125173.2 | usAfsUfuAfuAfAfaAfauaUf | 2891 |
| | | AfuaAfuaL96 | | | cUfuGfcuususudTdT | |
| AD-62646 | A-125157.17 | asasGfcAfaGfaUfAfUfuUfuu | 2879 | A-125647.1 | usAfsUfuAfuaAfaAfauaUfc | 2892 |
| | | AfuaAfuaL96 | | | UfuGfcuususudTdT | |
| AD-62647 | A-125134.1 | asasgcaagauaUfuuuua(Tgn) | 2880 | A-125139.1 | usAfsuuaUfaAfaAfauaUfcU | 2893 |
| | | aauaL96 | | | fuGfcuususudTdT | |
| AD-62648 | A-125134.1 | asasgcaagauaUfuuuua(Tgn) | 2881 | A-125173.2 | usAfsUfuAfuAfAfaAfauaUf | 2894 |
| | | aauaL96 | | | cUfuGfcuususudTdT | |
| AD-62649 | A-125134.1 | asasgcaagauaUfuuuua(Tgn) | 2882 | A-125647.1 | usAfsUfuAfuaAfaAfauaUfc | 2895 |
| | | aauaL96 | | | UfuGfcuususudTdT | |
| AD-62428 | A-125127.2 | asasgcaagaUfaUfuuuuauaau | 2883 | A-125139.1 | usAfsuuaUfaAfaAfauaUfcU | 2896 |
| | | aL96 | | | fuGfcuususudTdT | |
| AD-62650 | A-125127.2 | asasgcaagaUfaUfuuuuauaau | 2884 | A-125173.2 | usAfsUfuAfuAfAfaAfauaUf | 2897 |
| | | aL96 | | | cUfuGfcuususudTdT | |
| AD-62651 | A-125127.2 | asasgcaagaUfaUfuuuuauaau | 2885 | A-125647.1 | usAfsUfuAfuaAfaAfauaUfc | 2898 |
| | | aL96 | | | UfuGfcuususudTdT | |

### Example 8: Sustained C5 Protein Knockdown in Non-Human Primates

[0742] AD-62643 was tested for its ability to decrease the serum levels of C5 protein after long-term treatment. Cynomolgus macaques (N=3 per group) were administered AD-62643 via subcutaneous injection using two dosing regimens. In the first dosing regimen (Q2W), AD-62643 was administered every week for 8 weeks at a dose of 5 mg/kg, followed by administration every 2 weeks at a dose of 5 mg/kg thereafter (5 mg/kg, qw×8, q2w thereafter). In the second dosing regimen (QM), AD-62643 was administered every day at a dose of 5 mg/kg for 5 days, followed by administration every week for 8 weeks at a dose of 5 mg/kg, followed by a monthly administration of a dose of 10 mg/kg thereafter (5 mg/kg, qd×5, qw×8/10 mg/kg qm thereafter). The levels of C5 protein were quantified by ELISA, and C5 protein levels were normalized to the day 0 pre-bleed level. Serum hemolytic activity was analyzed using a sensitized sheep erythrocyte assay to measure classical pathway activity. The percent hemolysis was calculated relative to maximal hemolysis and to background hemolysis in control samples. The alternative complement pathway (CAP) activity was also measured.

[0743] FIG. 19A shows the average % serum C5 levels relative to the pre-bleed levels for the two tested dosing regimens. FIG. 19B shows the % serum C5 levels relative to the pre-bleed levels for each individual animal tested. The data demonstrates that both dosing regimens are able to achieve and maintain, on average, up to ˜99% (98.2±0.8%) knockdown of serum C5, with low inter-animal variation.

[0744] FIG. 20A shows % hemolysis and % CAP activity relative to control with the QM regimen and FIG. 20B shows % hemolysis and % CAP activity relative to control with the Q2W regimen. FIG. 20C shows the correlation of the hemolysis and CAP activity with the levels of C5 knockdown. The data demonstrate robust inhibition of both classical and alternative pathway of complement activity; specifically, C5 knockdown is associated with >80% (up to 96.2%) lowering of complement serum hemolytic activity and >90% (up to 96.9%) lowering of CAP activity.

### Example 9: C5 Silencing and Clinical Disease Activity in Mouse Model of Arthritis

[0745] AD-61679 was tested in a mouse model of anti-collagen antibody-induced arthritis (CAIA) for its ability to decrease serum C5 levels and to inhibit clinical disease activity, and compared to an anti-05 antibody. CAIA mice were administered AD-61679 (5 mg/kg, N=7), control siRNA (10 mg/kg, N=6), anti-05 antibody (50 mg/kg, N=7) and PBS (N=7). AD-61679 and siRNA control were administered three times (every 5 days—days −5, 0, 5); while the anti-05 antibody was administered once at day 0. Serum levels of C5 protein were measured using ELISA and are shown in FIG. 21. Clinical disease activity (CDA) was scored each day of the 10-day interval starting at day 0 and the results are shown in FIG. 22. Joint inflammation, pannus, and cartilage and bone damage were measured by scoring of hematoxylin and eosin (H&E) and Toluidine Blue histological stains (FIG. 23A). C3 deposition was also measured by immunohistochemistry using anti-C3 antibody (FIG. 23B).

[0746] As shown in FIG. 21, upregulation of the C5 levels over the 10-day treatment period is observed in mice treated with PBS, and control siRNA and anti-05 antibody, while robust knockdown of plasma C5 protein is observed in AD-61679 treated animals. No modulation of C5 knockdown by LPS, injected on day 3, is observed. Circulating liver-derived C5 appears to be a key driver of pathology in CAIA mice, with the locally produced C5 playing little or no role. The data in FIGS. 22A and 22B demonstrate that treatment with AD-61679, similar to the treatment with the anti-05 antibody, preserves joint histology, e.g., prevents inflammation, cartilage damage, bone damage and pannus, and prevents C3 deposition in the synovium and cartilage.

### Example 10: Effect of C5 Protein Knockdown in Rat Model of Membranous Nephropathy

[0747] AD-61679 was tested in a rat model of Passive Neymann Nephritis for its ability to reduce proteinurea. Nephritis was induced by injection of sheep anti-rat kidney fraction antiserum (anti-Fx1A) at day 0 and day 1. Control rats received no AD-61679 or anti-Fx1A treatment. Prior to the injection of anti-Fx1A, rats were administered AD-61679 at day −10, day −7 and day −3. AD-61679 was also administred on days 0, 1 and 4. Serum hemolytic activity in control rats, as well as rats treated with anti-Fx1a alone or with anti-Fx1a and AD-61679 was measured and is shown in FIG. 23A. Urine was collected on days 2 and 5, and levels of urinary protein at day were measured and are shown in FIG. 23B. The data indicate that AD-61679 is efficient in reducing serum hemolytic activity and proteinurea in the rat model of Passive Neymann Nephritis.

### Example 11: Phase VII—Part a Clinical Trial of AD-62643

[0748] A Phase I/II, randomized, double-blind, placebo-controlled, single-dose, dose escalation study was conducted in normal healthy volunteers (n=20) to evaluate the safety, tolerability, pharmacokinetics and pharmacodynamics of subcutaneously administered AD-62643 as described below.

[0749] Five cohorts, each including 4 subjects, participated in this study. One cohort was subcutaneously administered a single 50 mg dose of AD-62643; a second cohort was subcutaneously administered a single 200 mg dose of AD-62643; a third cohort was subcutaneously administered a single 400 mg dose of AD-62643; a fourth cohort was subcutaneously administered a single 600 mg dose of AD-62643; and a fifth cohort was subcutaneously administered a single 900 mg dose of AD-62643. A 200 mg/ml solution of AD-62643 was used for administration. The demographics and baseline characteristics of the subjects participating in the study are provided in Table 24.

TABLE 24
Demographics and baseline characteristics of healthy volunteers

| | Part A: Single Ascending Dose (SAD) | | | | |
|---|---|---|---|---|---|
| | Single subcutaneous injection | | | | |
| | 50 mg | 200 mg | 400 mg | 600 mg | 900 mg |
| | N = 4 | N = 4 | N = 4 | N = 4 | N = 4 |
| Age (years), | 23.8 | 22.5 | 22.0 | 28.5 | 26.8 |
| Mean (Min, Max) | (20, 26) | (21, 24) | (20, 27) | (23, 38) | (22, 33) |
| Gender: Male(%) | 100% | 100% | 75% | 0% | 50% |
| BMI (kg/m²), Mean | 24.08 | 22.35 | 21.38 | 24.80 | 23.53 |
| Race (%) | | | | | |
| Asian | 0% | 0% | 25% | 50% | 0% |
| Black/African | 25% | 50% | 0% | 0% | 25% |
| Caucasian | 50% | 25% | 50% | 50% | 75% |
| Other | 25% | 25% | 25% | 0% | 0% |
| Time on study, | 115 | 286 | 211 | 293 | 258 |
| Mean (days) | | | | | |

[0750] There were no injection site reactions, serious adverse events, or study discontinuations and no clinically significant changes in vital signs, physical exams, clinical laboratories (hematology, biochemistry, coagulation, and urinalysis), or ECGs.

[0751] The knockdown of C5 levels in the single fixed dose 50 mg, 200 mg, 400 mg, 600, and 900 mg cohorts, shown as a mean C5 knockdown relative to baseline, is depicted in FIG. 24. The maximum C5 knockdown relative to baseline was 99% and the mean maximum C5 knockdown was 98±0.9% (mean±SEM). The mean C5 knockdown of 96±1.0% (mean±SEM) was observed at Day 98 in the 900 mg cohort; the mean C5 knockdown of 97±1.1% (mean±SEM) was observed at Day 98 in the 600 mg cohort; and the mean C5 knockdown of 94±1.1% (mean±SEM) was observed at Day 182 in the 600 mg cohort.

[0752] The effect of administration of a single 50 mg, 200 mg, 400 mg, 600, and 900 mg dose of AD-62643 to inhibit complement activity, measured as alternative complement pathway (CAP) activity and as classical complement pathway (CCP) activity were assessed by determining the amount of active C5b-9 formation. CCP and CAP activation are ELISA based assays where complement in a serum sample is activated by a pathway specific activator present in the plate and the formation of Membrane Attack Complex (MAC) (C5b-9) is detected using antibody-based detection.

[0753] As shown in FIG. 25, the maximum CAP inhibition, relative to baseline, was up to 95%, with a mean maximum of inhibition of 93±1.3% (mean±SEM). FIG. 26 shows that the maximum CCP inhibition, relative to baseline, was up to 97%, with a mean maximum of inhibition of 96±0.7% (mean±SEM).

[0754] The effect of administration of a single 50 mg, 200 mg, 400 mg, 600, and 900 mg dose of AD-62643 to inhibit complement activity as measured by serum hemolytic activity was assessed using a sensitized sheep erythrocyte assays to measure CCP activation. As shown in FIG. 27, the maximum serum hemolysis inhibition, relative to baseline, was up to 79%, with a mean maximum hemolysis inhibition of 74±4.2% (mean±SEM).

[0755] A correlation analysis of the C5 knockdown in human and non-human primates was also performed. The correlation analysis assumed that a 50 mg dose in humans was equivalent to a 1 mg/kg dose in NHP and that a 400 mg dose in humans was equivalent to a 5 mg/kg dose in NHP. The knockdown of C5 levels in humans administered a single 50 mg or 400 mg subcutaneous dose of AD-62643 and NHP administered a single 1 mg/kg or 5 mg/kg subcutaneous dose of AD-62643 is shown in FIG. 28B and a graph showing the correlation of C5 knockdown in humans versus NHP is shown in FIG. 28A. This analysis demonstrated that there is a statistically significant correlation between C5 knockdown in humans and NHP with r=0.83 and p<0.0001 and that there is a 3 to 5 time increased potency of the dsRNAi agent for C5 knockdown in humans as compared to NHP.

[0756] FIG. 29 and Table 25 show that, in addition to knocking down C5 levels, AD-62643 also inhibits complement activity, measured as classical complement pathway (CCP) activity assessed by the amount of active C5b-9 formation, described above.

TABLE 25
Serum C5 knockdown and inhibition of complement activity

| | 50 mg | 200 mg | 400 mg |
|---|---|---|---|
| | N = 3 | N = 3 | N = 3 |
| Mean max C5 | 79 ± 2.2 | 94 ± 0.2 | 94 ± 2.0 |
| KD (% ± | | | |
| SEM) | | | |
| Max C5 KD | 84 | 94 | 96 |
| (%) | | | |
| Mean max | 59 ± 6.5 | 84 ± 1.7 | 82 ± 6.1 |
| CCP | | | |
| inhibition | | | |
| (% ± SEM) | | | |
| Max CCP | 72 | 86 | 92 |
| inhibition | | | |
| (%) | | | |
| Mean max | 59 ± 7.3 | 79 ± 1.2 | 75 ± 7.2 |
| CAP | | | |
| inhibition | | | |
| (% ± SEM) | | | |
| Max CAP | 73 | 81 | 87 |
| inhibition | | | |
| (%) | | | |

[0757] Complement activity measured by serum hemolytic activity was analyzed using a the sensitized sheep erythrocyte assay to measure classical pathway activity, described above. The percent hemolysis was calculated relative to maximal hemolysis and to background hemolysis in control samples.

[0758] FIG. 30A shows % hemolysis relative to control in subjects administered a single subcutaneous dose of AD-62643 and FIG. 30B shows % hemolysis in NHP administered a single subcutaneous dose of AD-62643. These data demonstrate that there is up to a 61% inhibition of serum hemolytic activity in humans with a single subcutaneous dose of AD-62643 and a mean maximum inhibition of 43±9.1%. Furthermore, comparison of the data in FIGS. 30A and 30B demonstrates that there is comparable hemolysis inhibition in humans and NHP administered a single dose of AD-62643.

[0759] A summary of the results of this Phase 1/II clinical trail are provided in Table 26.

TABLE 26
Summary of Phase I/II Part A Study

| | Part A: Single Ascending Dose (SAD) | | | | | |
|---|---|---|---|---|---|---|
| | Single subcutaneous injection | | | | | |
| | 50 mg | 200 mg | 400 mg | 600 mg | 900 mg | Placebo |
| Residual C5 | | | | | | |
| Mean nadir; μg/mL ± | 15.3 ± 2.5 | 5.2 ± 0.5 | 3.8 ± 1.0 | 2.2 ± 0.8 | 1.8 ± 0.2 | 59.6 ± 2.6 |
| SEM | | | | | | |
| Nadir; μg/mL | 10.8 | 4.3 | 1.8 | 1.1 | 1.4 | 53.5 |
| C5 knockdown | | | | | | |
| Mean max; % ± | 78 ± 3.2 | 93 ± 0.9 | 95 ± 1.4 | 98 ± 0.9 | 98 ± 0.3 | 14 ± 2.7 |
| SEM | | | | | | |
| Max; % | 84 | 95 | 97 | 99 | 98 | 20 |
| CCP inhibition | | | | | | |
| Mean max; % ± | 59 ± 6.5 | 84 ± 1.6 | 86 ± 3.2 | 96 ± 0.7 | 92 ± 1.1 | 20 ± 5.1 |
| SEM | | | | | | |
| Max; % | 72 | 86 | 93 | 97 | 94 | 37 |
| CAP inhibition | | | | | | |
| Mean max; % ± | 59 ± 7.3 | 79 ± 1.2 | 80 ± 5.7 | 93 ± 1.3 | 93 ± 0.7 | 26 ± 7.6 |
| SEM | | | | | | |
| Max; % | 73 | 81 | 91 | 95 | 94 | 44 |
| Hemolysis inhibition | | | | | | |
| Mean max; % ± | 35 ± 7.9 | 41 ± 4.4 | 48 ± 11.9 | 74 ± 4.2 | 71 ± 4.7 | 9 ± 1.4 |
| SEM | | | | | | |
| Max; % | 51 | 47 | 71 | 79 | 78 | 13 |

[0760] In summary, these data demonstrate that there is a robust, dose-dependent, statistically significant, and durable knockdown of serum C5 with a single dose of AD-62643. There was up 99% C5 knockdown with mean maximum knockdown of 98±9% (mean±SEM) after a single fixed dose which was durable and lasted for months. In addition, a single dose of AD-62643 resulted in a clinically meaningful reduction in complement activity as complement activity. Furthermore, these data demonstrate that there was an excellent translation from NHP studies suggesting a 3-5× increased potency in humans.

### Example 12: Phase I/II—Part B Clinical Trial of AD-62643

[0761] A Phase I/II, randomized, double-blind, placebo-controlled, multiple-dose, dose escalation study was conducted in normal healthy volunteers (n=24) to evaluate the safety, tolerability, pharmacokinetics and pharmacodynamics of subcutaneously administered AD-62643 as described below.

[0762] Six cohorts, each including 4 subjects, participated in this study. One cohort was subcutaneously administered a weekly 100 mg dose of AD-62643 for five weeks (q1W×5); a second cohort was subcutaneously administered a weekly 200 mg dose of AD-62643 for five weeks (q1W×5); a third cohort was subcutaneously administered a weekly 400 mg dose of AD-62643 for five weeks (q1W×5); a fourth cohort was administered a 600 mg dose of AD-62643 once every two weeks for seven weeks (q2W×7); a fifth cohort was administered a weekly 200 mg dose of AD-62643 for five weeks, followed by a 200 mg dose of AD-62643 once every two weeks for four weeks (qW×5, q2w×4); and a sixth cohort was administered a weekly 200 mg dose of AD-62643 for five weeks, followed by a 200 mg dose of AD-62643 once every month for two months (qW×5, qM×2). A 200 mg/ml solution of AD-62643 was used for administration. The demographics and baseline characteristics of the subjects participating in the study are provided in Table 27.

TABLE 27
Demographics and baseline characteristics of healthy volunteers

| | Part B: Multiple Ascending Dose (MAD) | | | | | |
|---|---|---|---|---|---|---|
| | N = 4/cohort | | | | | |
| | | | | | 200 mg | 200 mg |
| | 100 mg | 200 mg | 400 mg | 600 mg | qW × 5, | qW × 5, |
| | qW × 5 | qW × 5 | qW × 5 | q2W × 7 | q2W × 4 | qM × 2 |
| Age (years), Mean | 33.8 | 28.0 | 25.0 | 28.0 | 25.0 | 24.5 |
| (Min, Max) | (24, 39) | (24, 32) | (20, 30) | (24, 32) | (23, 30) | (19, 30) |
| Gender: Male (%) | 75% | 25% | 50% | 50% | 75% | 50% |
| BMI (kg/m²), Mean | 24.55 | 23.68 | 25.48 | 22.68 | 23.50 | 26.65 |
| Race (%) | | | | | | |
| Asian | 0% | 0% | 0% | 0% | 0% | 0% |
| Black/African | 0% | 0% | 0% | 0% | 0% | 0% |
| Caucasian | 100% | 100% | 100% | 100% | 75% | 100% |
| Other | 0% | 0% | 0% | 0% | 25% | 0% |
| Time on study, Mean (days) | 316 | 267 | 219 | 156 | 125 | 112 |

[0763] There were no injection site reactions, serious adverse events, or study discontinuations and no clinically significant changes in vital signs, physical exams, clinical laboratories (hematology, biochemistry, coagulation, and urinalysis), or ECGs.

[0764] The knockdown of C5 levels in the six cohorts, shown as a mean C5 knockdown relative to baseline, is depicted in FIG. 31. The maximum C5 knockdown, relative to baseline was 99% and the mean maximum C5 knockdown was 99±0.2% (mean±SEM). The mean C5 knockdown of 99±0.2% (mean±SEM) was observed at Day 112 in the 600 mg q2w×7 cohort.

[0765] The effect of multiple dose administration of AD-62643 to inhibit complement activity, measured as alternative complement pathway (CAP) activity and as classical complement pathway (CCP) activity was also assessed by determining the amount of active C5b-9 formation, as described above.

[0766] As shown in FIG. 32, the maximum CAP inhibition, relative to baseline, was up to 99.5%, with a mean maximum of inhibition of 97±1.5% (mean±SEM). FIG. 33 shows that the maximum CCP inhibition, relative to baseline, was up to 99.4%, with a mean maximum of inhibition of 97.3±1.0% (mean±SEM). The observed levels of inhibition of CAP and CAP activity in the second through the sixth cohorts (200 mg qW×5 and higher) were comparable to the levels of inhibition of CAP and CCP activity observed in subjects having a homozygous deletion of C5 (Seelen, et al. (2005) J Immunol Methods 296:187-198).

[0767] The effect of administration of multiple weekly doses of AD-62643 to inhibit complement activity as measured by serum hemolytic activity using a sensitized sheep erythrocyte assay to measure CCP activation (described above) was also assessed. As shown in FIG. 34, the maximum serum hemolysis inhibition, relative to baseline, was up to 98%, with a mean maximum hemolysis inhibition of 86±1.5% (mean±SEM).

[0768] A summary of the results of this Phase I/II clinical trial are provided in Table 28.

TABLE 28
Summary of Phase I/II Part B Study

| | Part B: Multiple Ascending Dose (MAD) | | | | | | |
|---|---|---|---|---|---|---|---|
| | Multiple Subcutaneous Injections | | | | | | |
| | | | | | 200 mg | 200 mg | |
| | 100 mg | 200 mg | 400 mg | 600 mg | qW × 5, | qW × 5, | Placebo |
| | qW × 5 | qW × 5 | qW × 5 | q2W × 7 | q2W × 4 | qM × 2 | N = 6 |
| Residual C5 levels | | | | | | | |
| Mean nadir; mcg/mL ± SEM | 4.2 ± 0.5 | 1.3 ± 0.3 | 1.3 ± 0.2 | 0.8 ± 0.1 | 1.4 ± 0.3 | 2.7 ± 1.7 | 60.2 ± 5.4 |
| Nadir; mcg/mL | 3.5 | 0.6 | 1.0 | 0.7 | 1.0 | 1.0 | 37.3 |
| C5 knockdown | | | | | | | |
| Mean max; % ± SEM | 95 ± 0.4 | 98 ± 0.5 | 98 ± 0.2 | 99 ± 0.2 | 98 ± 0.4 | 97 ± 2.1 | 24 ± 5.3 |
| Max; % | 96 | 99 | 99 | 99 | 99 | 99 | 43 |
| CAP inhibition | | | | | | | |
| Mean max; % ± SEM | 84 ± 2.1 | 95 ± 1.0 | 97 ± 1.5 | 97 ± 0.8 | 95 ± 0.8 | 89 ± 6.5 | 25 ± 5.8 |
| Max; % | 88 | 97 | 100 | 98 | 96 | 96 | 50.4 |
| CCP inhibition | | | | | | | |
| Mean max; % ± SEM | 85 ± 2.6 | 96 ± 0.9 | 97 ± 1.0 | 97 ± 0.7 | 96 ± 1.0 | 89 ± 6.0 | 28 ± 7.0 |
| Max; % | 91 | 97 | 99 | 98 | 98 | 95 | 50 |
| Hemolysis inhibition | | | | | | | |
| Mean max; % ± SEM | 52 ± 4.9 | 75 ± 8.0 | 84 ± 7.6 | 86 ± 1.5 | — | — | 5 ± 2.0 |
| Max; % | 58 | 91 | 98 | 89 | — | — | 10 |

[0769] An indirect comparison of residual C5 levels in the serum of healthy human volunteers administered multiple doses of AD-62643 and the levels of free C5 in aHUS subjects administered eculizumab was performed. Free C5 was measured using a validated electrochemiluminescence immunoassay and residual C5 was measured using a validated liquid chromatography-mass spectrometry (LCMS) assay The results of this analysis demonstrate that the residual C5 levels achieved with AD-62643 multi-administration are comparable to the levels of free C5 in patients administered eculizumab; the maximum percent inhibition of free C5 following administration of Eculizumab was 93.5% (FIG. 35A) and the maximum percent inhibition of residual C5, relative to baseline, following administration of AD-62643 was 100% (FIG. 35B), with a mean maximum inhibition of 100%±0.2% (mean±SEM).

[0770] In summary, these data demonstrate that there is a robust, dose-dependent, statistically significant, and durable knockdown of serum C5 with multi-dose subcutaneous administration of AD-62643. After 5 weekly doses of AD-62643 there was up to 99% C5 knockdown, with a mean maximum knockdown of 99±0.2%, which was durable and lasted for months. In addition, very low inter-subject variability was observed.

[0771] Furthermore, a multiple dose of AD-62643 resulted in a clinically meaningful reduction in complement activity. The observed nadir of residual C5 was as low as 0.6 microgram (mcg)/mL and after five weekly doses of AD-62643, complement activity (CAP and CCP activity) were reduced by up to 99.5% with mean maximum inhibition of 97±1.5% for CAP and 99±0.2% for CCP. A reduction of serum hemolytic activity up to 98% with mean maximum inhibition of 86±1.5% was also observed following administration of five weekly doses of AD-62643.

### Example 13: Phase VII—Part C Clinical Trial of AD-62643

[0772] Part C of the Phase I/II Clinical Trial of AD-62643 was an exploratory evaluation of subcutaneously administered AD-62643 and hepatic C5 knockdown for the treatment of PNH. AD-62643 was administered as a monotherapy to eculizuman naïve PNH patients (n=3) or as a combination therapy to PNH patients being treated with eculizumab (n=3), including a patient with inadequate response to eculizumab.

[0773] The demographics and baseline characteristics of the subjects participating in the study are provided in Table 29.

TABLE 29
Demographics and baseline characteristics of
six PNH patients administered AD-62643
Part C: PNH Patients

| | |
|---|---|
| Age (years), | 43.7 |
| Mean (Min, Max) | (25, 58) |
| Gender: Male (%) | 50% |
| BMI (kg/m²), Mean | 24.6 |
| Race (%) | |
| Asian | 0% |
| Black/African | 0% |
| Caucasian | 100% |
| Other | 0% |
| Time on study, Mean (days) | 256 |
| Time in exploratory Eculizumab sparing | 108 |
| study, days; mean | |

[0774] Two cohorts, each including 3 subjects, participated in this study. The first cohort included eculizumab naïve subjects. Two subjects in the first cohort were subcutaneously administered a weekly 200 mg dose of AD-62643 for twelve weeks (q1W×12), followed by a weekly 400 mg dose for 3 weeks (q1W×3). The third subject in the first cohort was subcutaneously administered a weekly 400 mg dose for 7 weeks (qW×7). After AD-62643 dosing was completed, all subjects in the first cohort received a single 600 mg dose of eculizumab for residual hemolysis.

[0775] The second cohort included two subjects receiving 900 mg of eculizumab every other week (background eculizumab subjects) and one subject receiving 1200 mg of eculizumab every other week (an inadequate responder to eculizumab). The first subject on 900 mg of eculizumab was subcutaneously administered a weekly 400 mg dose of AD-62643 for 3 weeks (q1W×3); the second subject on 900 mg of eculizumab was subcutaneously administered a weekly 400 mg dose of AD-62643 for 2 weeks (q1W×2); and the third subject on 1200 mg of eculizumab was subcutaneously administered a weekly 200 mg dose of AD-62643 for 11 weeks (q1W×11). The dosing schedules for each patient are summarized in Table 30 below.

TABLE 30
Dosing schedule of PNH patients administered AD-62643

| Patient | | |
|---|---|---|
| No. | Eculizumab Status | AD-62643 Dosing Schedule |
| 0081 | Naïve | 200 mg once weekly for 12 weeks, then |
| | | 400 mg once weekly for 3 weeks |
| 0082 | Naïve | 200 mg once weekly for 12 weeks, then |
| | | 400 mg once weekly for 3 weeks |
| 0061 | Naïve | 400 mg once weekly for 7 weeks |
| 0063 | Receiving 900 mg | 400 mg once weekly for 3 weeks |
| | every other week | |
| 0064 | Receiving 900 mg | 400 mg once weekly for 2 weeks |
| | every other week | |
| 0083 | Receiving 1200 mg | 200 mg once weekly for 11 weeks |
| | every other week | |
| | inadequate responder | |

[0776] There were no serious adverse events or study discontinuations due to adverse events. All six patients reported at least one adverse event, and the majority of reported adverse events were mild to moderate in severity. No other clinically significant changes in vital signs, EKG, physical exams or clinical laboratories (hematology, biochemistry, coagulation, and urinalysis) were observed.

[0777] The knockdown of C5 levels were measured in the eculizumab naïve subjects, and the data is depicted in FIG. 36A as a mean C5 knockdown relative to baseline. In these subjects, maximum C5 knockdown, relative to baseline was up to 98.7%, the mean maximum C5 knockdown was 98.2±0.3% (mean±SEM), and the minimum residual C5 levels were 0.9 mcg/mL.

[0778] The knockdown of C5 levels was also measured in subjects receiving eculizumab, and the data is depicted in FIG. 36B as a mean C5 knockdown relative to baseline. In these subjects, the maximum C5 knockdown, relative to baseline was up to 97.8%, the mean maximum C5 knockdown was 86.7±5.6% (mean±SEM), and the minimum residual C5 levels were 7.9 mcg/mL. Interestingly, starting levels of total C5 in subjects receiving eculizumab were markedly higher than the levels in eculizumab naïve patients, suggesting that treatment with eculizumab may lead to increased total C5 levels.

[0779] The effect of AD-62643 administration on complement activity, measured as classical complement pathway (CCP) activity and alternative complement pathway (CAP) activity, was also assessed by determining the amount of active C5b-9 formation, as described above. The results for eculizumab naïve subjects are depicted in FIG. 37A. In these subjects, the maximum CCP inhibition, relative to baseline, was up to 96.7%, and the mean maximum of inhibition of 94.2±1.7% (mean±SEM). Similar results were observed with alternative pathway assay (CAP C5b-9 ELISA). The results for subjects receiving eculizumab are depicted in FIG. 37B. In these subjects, residual complement activity was measured as being <2% from day 21 onward.

[0780] The effect of AD-62643 administration on complement activity as measured by serum hemolytic activity using a sensitized sheep erythrocyte assays (described above) was also assessed. The results for eculizumab naïve subjects are shown in FIG. 38A. In these subjects, the maximum serum hemolysis inhibition, relative to baseline, was up to 81.5%, with a mean maximum hemolysis inhibition of 75.6±4.5% (mean±SEM). The results for background eculizumab subjects are depicted in FIG. 38B. In these subjects, residual sheep red blood cell (sRBC) hemolysis was <3% from day 21 onward.

[0781] During treatment of subjects with AD-62643, LDH levels were also monitored in all patients. FIG. 39 depicts levels of LDH measured in eculizumab naïve patients. In these patients, maximum LDH reduction relative to baseline of 37% and 50% was observed in patients 0082 and 0081, respectively, however, LDH levels remained >1.5×ULN. In patient 0061, who had lower LDH at baseline and received only 8 doses of AD-62643, LDH lowering was not observed. LDH levels were also monitored in eculizumab naïve subjects after administration of a single 600 mg dose of eculizumab. In all three subjects, lowering of LDH <1.5 ULN was observed and was sustained out to 4 weeks. The data on LDH levels after administration of a single dose of eculimumab is presented in Table 31 below.

TABLE 31
LDH levels after administration of a single 600 mg dose
of eculizumab in eculizumab naïve patients.

| | LDH (Ul/L) | | |
|---|---|---|---|
| | Days post Ecu single dose (600 mg) | | |
| Patient | Day 0 | Day 14 | Day 28 |
| 0061 | 426 | 217 | 222 |
| 0081 | 874 | ND | 224 |
| 0082 | 1089 | ND | 280 |

LDH ULN: 214-225 (1.5 × ULN values: 321-338)
ND—not determined; samples were not collected.

[0782] LDH levels were also measured in subjects receiving eculizumab. In the two background eculizumab subjects (patients 0063 and 0064), normal LDH at baseline was maintained during the treatment with AD-62643. In the eculizumab inadequate responder (patient 0083), LDH at day 0 was 966 IU/L while this patient received eculizumab at above labeled dose of 1200 mg every other week. Treatment of this subject with AD-62643 resulted in lowering of LDH levels by day 35 to within reference range. On day 56, eculizumab dose was reduced to labeled dose of 900 mg, every other week. As evidenced by the data presented in FIG. 40, LDH control was maintained out to day 11 in the eculizumab inadequate responder.

[0783] Shown in FIG. 41 is plasma concentration of eculizumab in one subject receiving eculizumab during treatment with AD-62643. The results in FIG. 41 demonstrate that, in one subject, serum knockdown of C5 levels with AD-62643 results in >3× increase in pre-dose eculizumab through levels.

[0784] The results of the Part C of Phase I/II clinical trial indicate that AD-62643 is well tolerated, with most adverse events being mild or moderate in severity. In eculizumab naïve subjects, AD-62643 achieved robust knockdown of the C5 levels, inhibition of complement activity and modest lowering of LDH, but at levels >1.5 ULN. In these patients, normalization of LDH levels was achieved for 4 weeks with a single 600 mg dose of eculizumab following treatment with AD-62643, which represents 25% of eculizumab induction label dose. Therefore, the experimental data supports a reduced eculizumab dose and frequency of administration when this treatment is combined with AD-62643 administration.

[0785] In subjects receiving eculizumab, treatment with AD-62643 also achieved robust knockdown of the C5 levels and inhibition of complement activity. In the eculizumab inadequate responder, AD-62643 demonstrated preliminary evidence of clinical activity by normalizing LDH levels to <1.5×ULN and improving hemoglobin levels and achieving higher eculizumab plasma concentration through levels. This allowed for the lowering of the initial eculizumab dose of 1200 mg to 900 mg administered every other week.

### Example 14: Phase VII—Extension of Part C Clinical Trial of AD-62643

[0786] Upon completion of dosing with AD-62643 in the study described in Example 13, the investigators initiated eculizumab treatment in eculizumab naïve PNH patients in the setting of ongoing AD-62643 pharmacology (i.e., in the absence of additional dosing of AD-62643) (referred to herein as the “Ecu sparing study”) in order to explore the potential for reducing the dose and frequency of eculizumab administration. Additionally, the investigators initiated a reduction in the frequency of dosing in patients that had previously received eculizumab.

[0787] The patients participating in this part of the study were those described above in Example 13, and included 3 eculizumab naïve patients, 2 background eculizumab patients, and 1 inadequate responder to eculizumab subject (also referred to as a background eculizumab subject). The demographics and background characteristics for these patients at the beginning of the multiple dosing study of AD-62643 described in Example 13 are summarized in Table 29, above, and the dosing schedules for the multiple dosing study of AD-62643 described in Example 13 for each subject are summarized, above, in Table 30. The time between the last dose of AD-62643 and the initiation of the Ecu sparing study varied from subject to subject and ranged from weeks to months. Specifically, for the three eculizumab naive subjects, there were 28, 28, or 7 days between the last AD-62643 dose and start of ecu sparing study. For the three background eculizumab subjects, there were 63, 70 or 70 days between the last eculizumab dose and the start of the ecu sparing study. During the gap, the background eculizumab patients received 900 mg of eculizumab q2W until the start of the ecu sparing study where monthly dosing of eculizumab began.

[0788] As shown in FIG. 42, in the Ecu sparing study, the Ecu naïve patients were administered a single 600 mg dose of eculizumab once every four weeks (Ecu 600 mg q4W), and the background eculizumab patients were transitioned to a spared eculizumab regimen of a single 900 mg dose of eculizumab once every four weeks (Ecu 900 mg q4W). These doses of eculizumab, 600 mg or 900 mg once every four weeks, represent 33% or 50% of the label maintenance dose of eculizumab, respectively. Patients were followed every 2 weeks until study Day 280 and monitored for safety and laboratory parameters including LDH, PD and Ecu PK. FIG. 42 also summarizes the patients, the number of AD-62643 doses received prior to initiation of the Ecu sparing study, and the % of C5 knockdown at the start of the Ecu sparing study.

[0789] There were no serious adverse events or study discontinuations due to adverse events. All six patients reported at least one adverse event, and the majority of reported adverse events were mild to moderate in severity. No other clinically significant changes in vital signs, EKG, physical exams or clinical laboratories (hematology, biochemistry, coagulation, and urinalysis) were observed.

[0790] LDH levels were measured in the subjects and, as shown in FIG. 43, Ecu naïve patients receiving a single 600 mg dose of eculizumab q4W achieved and maintained LDH levels of less than or about 1.5×ULN. FIG. 43 also demonstrates that background eculizumab patients receiving a single 900 mg dose of eculizumab q4W maintained LDH levels less than or about 1.5×ULN. Furthermore, in the background eculizumab patient with prior inadequate eculizumab response, LDH normalization was generally maintained with a 900 mg dose of eculizumab q4W.

[0791] The effect of Ecu sparing on complement activity, measured as classical complement pathway (CCP) activity, was also assessed by determining the amount of active C5b-9 formation, as described above. As demonstrated in FIG. 44A, the CCP level at Day 84 since the start of the Ecu sparing study was 0.3±0.3% for 600 mg q4W patients, and, for the 900 mg q4W patients, the CCP level was 0.4±0.2%. Similar results were observed with an alternative pathway assay (CAP C5b-9 ELISA).

[0792] The effect of Ecu sparing on complement activity as measured by serum hemolytic activity using a sensitized sheep erythrocyte assay (described above) was also assessed. As shown in FIG. 44B, residual sheep red blood cell (sRBC) hemolysis at day 84 since start of Ecu sparing was 0% for the 600 mg q4W patients and 0.4±0.4% for the 900 mg q4W patients.

[0793] Shown in FIG. 45 is plasma concentration of eculizumab in the patients participating in the Ecu sparing study which demonstrate that eculizumab trough levels are sustained with monthly dosing of 600 mg or 900 mg of eculizumab.

[0794] In summary, the study demonstrates that, in eculizumab Ecu naïve patients, normalization of LDH levels was achieved and maintained for up to 6 months with a dose of 600 mg of eculizumab q4W. This dose of eculizumab represents a 67% reduction in the eculizumab label maintenance dose. In background eculizumab patients, maintenance of LDH levels was achieved for 5 months with a dose of 900 mg of eculizumab q4W. This dose of eculizumab represents a 50% reduction in the eculizumab label maintenance dose. In the background eculizumab patient with prior inadequate response at 1200 mg of eculizumab q2W, LDH normalization was maintained with 900 mg q4W. Accordingly, this study demonstrates the efficacy of AD-62643 treatment for patients having PNH as part of a treatment paradigm for reducing the dose and frequency of eculizumab in naïve and background eculizumab patients and for improving disease control in inadequate eculizumab responders.

The application's sequence listing, which the Patent Office published only in electronic form, follows.

SEQUENCE LISTING (2899 sequences)

SEQ ID NO: 1 - DNA, 5480 bp, Homo sapiens
tatatccgtggtttcctgctacctccaaccatgggccttttgggaatactttgttttttaatcttcctggggaaaacctggggacaggagcaaacatatgtcatttcagcaccaaaaatattccgtgttggagcatctgaaaatattgtgattcaagtttatggatacactgaagcatttgatgcaacaatctctattaaaagttatcctgataaaaaatttagttactcctcaggccatgttcatttatcctcagagaataaattccaaaactctgcaatcttaacaatacaaccaaaacaattgcctggaggacaaaacccagtttcttatgtgtatttggaagttgtatcaaagcatttttcaaaatcaaaaagaatgccaataacctatgacaatggatttctcttcattcatacagacaaacctgtttatactccagaccagtcagtaaaagttagagtttattcgttgaatgacgacttgaagccagccaaaagagaaactgtcttaactttcatagatcctgaaggatcagaagttgacatggtagaagaaattgatcatattggaattatctcttttcctgacttcaagattccgtctaatcctagatatggtatgtggacgatcaaggctaaatataaagaggacttttcaacaactggaaccgcatattttgaagttaaagaatatgtcttgccacatttttctgtctcaatcgagccagaatataatttcattggttacaagaactttaagaattttgaaattactataaaagcaagatatttttataataaagtagtcactgaggctgacgtttatatcacatttggaataagagaagacttaaaagatgatcaaaaagaaatgatgcaaacagcaatgcaaaacacaatgttgataaatggaattgctcaagtcacatttgattctgaaacagcagtcaaagaactgtcatactacagtttagaagatttaaacaacaagtacctttatattgctgtaacagtcatagagtctacaggtggattttctgaagaggcagaaatacctggcatcaaatatgtcctctctccctacaaactgaatttggttgctactcctcttttcctgaagcctgggattccatatcccatcaaggtgcaggttaaagattcgcttgaccagttggtaggaggagtcccagtaacactgaatgcacaaacaattgatgtaaaccaagagacatctgacttggatccaagcaaaagtgtaacacgtgttgatgatggagtagcttcctttgtgcttaatctcccatctggagtgacggtgctggagtttaatgtcaaaactgatgctccagatcttccagaagaaaatcaggccagggaaggttaccgagcaatagcatactcatctctcagccaaagttacctttatattgattggactgataaccataaggctttgctagtgggagaacatctgaatattattgttacccccaaaagcccatatattgacaaaataactcactataattacttgattttatccaagggcaaaattatccactttggcacgagggagaaattttcagatgcatcttatcaaagtataaacattccagtaacacagaacatggttccttcatcccgacttctggtctattacatcgtcacaggagaacagacagcagaattagtgtctgattcagtctggttaaatattgaagaaaaatgtggcaaccagctccaggttcatctgtctcctgatgcagatgcatattctccaggccaaactgtgtctcttaatatggcaactggaatggattcctgggtggcattagcagcagtggacagtgctgtgtatggagtccaaagaggagccaaaaagcccttggaaagagtatttcaattcttagagaagagtgatctgggctgtggggcaggtggtggcctcaacaatgccaatgtgttccacctagctggacttaccttcctcactaatgcaaatgcagatgactcccaagaaaatgatgaaccttgtaaagaaattctcaggccaagaagaacgctgcaaaagaagatagaagaaatagctgctaaatataaacattcagtagtgaagaaatgttgttacgatggagcctgcgttaataatgatgaaacctgtgagcagcgagctgcacggattagtttagggccaagatgcatcaaagctttcactgaatgttgtgtcgtcgcaagccagctccgtgctaatatctctcataaagacatgcaattgggaaggctacacatgaagaccctgttaccagtaagcaagccagaaattcggagttattttccagaaagctggttgtgggaagttcatcttgttcccagaagaaaacagttgcagtttgccctacctgattctctaaccacctgggaaattcaaggcgttggcatttcaaacactggtatatgtgttgctgatactgtcaaggcaaaggtgttcaaagatgtcttcctggaaatgaatataccatattctgttgtacgaggagaacagatccaattgaaaggaactgtttacaactataggacttctgggatgcagttctgtgttaaaatgtctgctgtggagggaatctgcacttcggaaagcccagtcattgatcatcagggcacaaagtcctccaaatgtgtgcgccagaaagtagagggctcctccagtcacttggtgacattcactgtgcttcctctggaaattggccttcacaacatcaatttttcactggagacttggtttggaaaagaaatcttagtaaaaacattacgagtggtgccagaaggtgtcaaaagggaaagctattctggtgttactttggatcctaggggtatttatggtaccattagcagacgaaaggagttcccatacaggatacccttagatttggtccccaaaacagaaatcaaaaggattttgagtgtaaaaggactgcttgtaggtgagatcttgtctgcagttctaagtcaggaaggcatcaatatcctaacccacctccccaaagggagtgcagaggcggagctgatgagcgttgtcccagtattctatgtttttcactacctggaaacaggaaatcattggaacatttttcattctgacccattaattgaaaagcagaaactgaagaaaaaattaaaagaagggatgttgagcattatgtcctacagaaatgctgactactcttacagtgtgtggaagggtggaagtgctagcacttggttaacagcttttgctttaagagtacttggacaagtaaataaatacgtagagcagaaccaaaattcaatttgtaattctttattgtggctagttgagaattatcaattagataatggatctttcaaggaaaattcacagtatcaaccaataaaattacagggtaccttgcctgttgaagcccgagagaacagcttatatcttacagcctttactgtgattggaattagaaaggctttcgatatatgccccctggtgaaaatcgacacagctctaattaaagctgacaactttctgcttgaaaatacactgccagcccagagcacctttacattggccatttctgcgtatgctctttccctgggagataaaactcacccacagtttcgttcaattgtttcagctttgaagagagaagctttggttaaaggtaatccacccatttatcgtttttggaaagacaatcttcagcataaagacagctctgtacctaacactggtacggcacgtatggtagaaacaactgcctatgctttactcaccagtctgaacttgaaagatataaattatgttaacccagtcatcaaatggctatcagaagagcagaggtatggaggtggcttttattcaacccaggacacaatcaatgccattgagggcctgacggaatattcactcctggttaaacaactccgcttgagtatggacatcgatgtttcttacaagcataaaggtgccttacataattataaaatgacagacaagaatttccttgggaggccagtagaggtgcttctcaatgatgacctcattgtcagtacaggatttggcagtggcttggctacagtacatgtaacaactgtagttcacaaaaccagtacctctgaggaagtttgcagcttttatttgaaaatcgatactcaggatattgaagcatcccactacagaggctacggaaactctgattacaaacgcatagtagcatgtgccagctacaagcccagcagggaagaatcatcatctggatcctctcatgcggtgatggacatctccttgcctactggaatcagtgcaaatgaagaagacttaaaagcccttgtggaaggggtggatcaactattcactgattaccaaatcaaagatggacatgttattctgcaactgaattcgattccctccagtgatttcctttgtgtacgattccggatatttgaactctttgaagttgggtttctcagtcctgccactttcacagtgtacgaataccacagaccagataaacagtgtaccatgttttatagcacttccaatatcaaaattcagaaagtctgtgaaggagccgcgtgcaagtgtgtagaagctgattgtgggcaaatgcaggaagaattggatctgacaatctctgcagagacaagaaaacaaacagcatgtaaaccagagattgcatatgcttataaagttagcatcacatccatcactgtagaaaatgtttttgtcaagtacaaggcaacccttctggatatctacaaaactggggaagctgttgctgagaaagactctgagattaccttcattaaaaaggtaacctgtactaacgctgagctggtaaaaggaagacagtacttaattatgggtaaagaagccctccagataaaatacaatttcagtttcaggtacatctaccctttagattccttgacctggattgaatactggcctagagacacaacatgttcatcgtgtcaagcatttttagctaatttagatgaatttgccgaagatatctttttaaatggatgctaaaattcctgaagttcagctgcatacagtttgcacttatggactcctgttgttgaagttcgtttttttgttttcttctttttttaaacattcatagctggtcttatttgtaaagctcactttacttagaattagtggcacttgcttttattagagaatgatttcaaatgctgtaactttctgaaataacatggccttggagggcatgaagacagatactcctccaaggttattggacaccggaaacaataaattggaacacctcctcaaacctaccactcaggaatgtttgctggggccgaaagaacagtccattgaaagggagtattacaaaaacatggcctttgcttgaaagaaaataccaaggaacaggaaactgatcattaaagcctgagtttgctttcaaaaaaaaaaaaaaaaaa

SEQ ID NO: 2 - DNA, 5384 bp, Macaca mulatta
  modified_base (2876)..(2895): a, c, t, g, unknown or other
catgatttcctgctacctccaaccatgggccttttgggaatactttgttttttaatcttcctgggaaaaacttggggacaggagcaaacatatgtcatttcagcaccaaaaatattccgtgttggagcatctgaaaacattgtgattcaagtttatggatacactgaagcatttgatgcaacaatctctattaaaagttatcctgataaaaaatttagttactcctcaggccatgttcatttatcctcagagaataaattccaaaactcggcagtcttaacaatacaaccaaaacaattacctggaggacaaaaccaagtttcttatgtgtatttggaagttgtatcaaagcatttttcaaaatcaaaaaaaattccaataacctatgacaatggatttctcttcattcatacagacaaacctgtttatactccagaccaatcagtaaaggttagagtttattcgttgaatgatgacttgaagccagccaaaagagaaactgtcttaactttcatagatcctgaaggatcagaaattgacatggtagaagaaattgatcatattggaattatctcttttcctgacttcaagattccgtctaatcctagatatggtatgtggatgatccaggctaaatataaagaggacttttcaacaactggaactgcattttttgaagttaaagaatatgtcttgccacatttttctgtctcagtagaaccagaaagtaatttcattggttataagaactttaagaattttgaaattactataaaagcaagatatttttataataaagtagtcactgaggctgatgtttatatcacatttggaataagagaagacttaaaagatgatcaaaaagaaatgatgcaaacagcaatgcaaaacacaatgttgataaatggaattgctcaagtcacatttgattctgaaacagcagtcaaagaactgtcatactacagtttagaagatttaaacaacaagtacctttatattgctgtaacagtcatagagtctacaggtggattttctgaagaggcagaaatacctggcatcaaatatgtcctctctccctacaaactgaatttggttgctactcctcttttcctgaagcctgggattccatattccatcaaggtgcaggttaaagatgcgcttgaccagttggtaggaggggtcccagtaacactgaatgcacaaacaattgatgtcaaccaagagacatctgacttggagccaaggaaaagtgtaacacgtgttgatgatggagtagcttcgtttgtggttaatctcccatctggagtgacggtgctggagtttaatgtcaaaactgatgctccagatcttccagacgaaaatcaggccagggaaggttaccgagcaatagcatactcatctctcagccaaagttacctttatatcgattggactgataaccacaaggctttgctagtgggagaatatttgaatattattgttacccccaaaagcccatatattgacaaaataactcactataattacttgattttatccaagggcaaaattatccactttggcacaagggagaaactttcagatgcatcttatcaaagtataaacattccagtaacgcagaacatggttccttcatcccgactcctggtctattacatcgtcacaggagagcagacagcagaattagtgtctgattcagtctggttaaatattgaagaaaaatgtggcaaccagctccaggttcatctgtctcctgatgcagatacatattctccaggccaaactgtgtctcttaatatggtaactgggatggattcctgggtggcattaacagcagtggacagcgctgtgtatggagtccaaagaagagccaaaaagcccttggaaagagtatttcaattcttagagaagagtgatctgggctgtggggcaggtggtggcctcaacaatgccaatgtgttccacctagctggacttaccttcctcactaatgcaaatgcagatgactcccaagaaaatgatgaaccttgtaaagaaattatcaggccaagaagaatgctacaagagaagatagaagaaatagctgctaaatataaacatttagtagtgaagaaatgttgttacgatggagtccgtattaatcatgatgaaacctgtgagcagcgagctgcacggattagtgtagggccgagatgcgtcaaagctttcactgaatgttgtgtcgtcgcaagccagctccgtgctaataactctcataaagacttgcaattgggaaggctacacatgaagaccctgttaccagtaagcaagccagaaattcggagttattttccagaaagctggttatgggaagttcatcttgttcccagaagaaaacagttgcagtttgccctacctgattctgtaactacctgggaaattcaaggtgttggcatttcaaacagtggtatatgtgttgctgatactattaaggcaaaggtgttcaaagatgtcttcctggaaatgaatataccatattctgttgtacgaggagaacaggtccagttgaaaggaactgtttacaactataggacttctgggatgcagttctgtgttaaaatgtctgctgtggagggaatctgcacttcagaaagcccagtcattgatcatcagggcacaaagtcctccaaatgtgtgcgacagaaagtagagggctcctctaatcacttggtgacctttactgtgcttcctctggaaattggccttcagaacatcaatttctcactggagacttcgtttggaaaagaaatcttagtaaaatcgttacgagtggtgccagaaggtgtcaaaagggaaagctattctggtattactttggatcctaggggtatttatgnnnnnnnnnnnnnnnnnnnncgaaaggagttcccatacaggataccattagatttggtccccaaaacagaaatcaaaaggattttgagtgtaaaaggactgcttgtaggtgagatcttgtctgcagttctaagtcgggaaggcatcaatatcctaacccacctccccaaagggagtgcagaggcggagctgatgagcgttgtcccagtattctatgtttttcactacctggaaacaggaaatcattggaacatttttcattccgacccattaattgaaaagcggaacctggagaaaaaattaaaagaagggatggtgagcattatgtcctacagaaatgctgactattcttacagcgtgtggaagggtggcagtgctagcacttggttaacagcttttgctttaagagtacttggacaagtacataaatatgtagagcagaaccaaaattcaatatgtaattctttattgtggctggttgagaattatcagttagataatggatccttcaaggaaaattcacagtatcaaccaataaaattacagaaaatcaacacagctctaattaaagctgacacctttctgcttgaaaatacactgccagcccagagcacctttacattggccatttctgcctatgctctttccctgggagataaaactcacccacagttttgttcaattgtttcagctttgaagagagaagctttggttaaaggtaatccacccatttatcgtttttggaaagacagtcttcaacataaagacagctctgtacctaacactggtacagcacgtatggtagaaacaactgcctatgctttactcaccagtctgaacttgaaagacataaattatgttaacccaatcatcaaatggctatcagaagagcagaggtatggaggtggcttttattcaacccaggacacaatcaatgccatcgagggcctgacagaatattcactcctggttaaacagctccgcttgaatatggacatcgatgttgcttacaagcataaaggtcccttacataattataaaatgacagacaagaatttccttgggaggccagtagaggtgcttctcaatgatgacctcgttgtcagtacaggatttggcagtggcttggctacggtacatgtaacaactgtagttcacaaaaccagtacctctgaggaagtttgcagcttttatttgaaaattgatactcaggatattgaagcatcccactacagaggctacggaaactctgattacaaacgcatagtagcatgtgccagctacaagcccagcaaggaagaatcatcttctggatcctctcatgcagtgatggacatctccttgcctactggaatcaatgcaaatgaagaagacttaaaagctcttgtggaaggggtggatcagctattcactgattaccaaataaaagatggacatgttattctgcaactgaattcgatcccctccagtgatttcctttgtgtacgattccggatttttgaactctttgaagttgggtttcttagtcctgccactttcacagtgtatgaataccacagaccagataaacagtgtaccatgttttatagcacttccaatatcaaaattcagaaagtctgtgaaggagccacgtgcaagtgtatagaagctgattgtgggcaaatgcagaaagaattggatctgacaatctctgcagagactagaaaacaaacagcatgtaacccagagattgcatatgcttataaagttatcatcacatccatcactacagaaaatgtttttgtcaagtacaaggcaacccttctggatatctacaaaactggggaagctgttgctgaaaaagactctgaaatcaccttcattaaaaaggtaacctgcactaacgctgagctggtgaaaggaagacagtacttaattatggggaaagaagctctccagataaaatacaatttcactttcaggtacatctaccctttagattccttgacctggattgaatactggcctagagacacaacatgttcatcgtgtcaagcatttttagctaatttagatgaatttgctgaagacatctttttaaatggatgctaaaattcctgaagttcagctgcatacagtttgcacttatggactcctgttgttgaagtttgtttttttttctcgtttttttgtctttaaacattcacagctggtcttatttgtaaagctcactttacttagaattagtggcacttgcttttattagagaatgattttaaacgctgtaactttctgaaataacatggccttggagggcatgaagacagatactcctccaaggttattggacaccggaaacaataaattagaacacctcctcaaacctaccacttaggaatgtttgctggagccgaaagaacagtccattgaaatggagtattacaaaaacatggcctttgcttgaaagaaaataccaggggacaggaaactgatcattaaagcctgagtttgctttcaaactgtgctaaaaa

SEQ ID NO: 3 - DNA, 5448 bp, Mus musculus
tttaaaaggaaagtggttacagggaggccatgcccatgggtttatgccgctaccagccatgggtctttggggaatactttgtcttttaattttcctggacaaaacttggggacaggaacaaacctacgtcatttcagcacccaaaatcctccgggtcggctcgtctgaaaatgtggtaattcaagtccatggctacactgaagcatttgatgcaactctttctctaaaaagctatcctgacaaaaaagtcaccttctcttcaggctatgttaatttgtccccggaaaacaaattccaaaacgcggcactgttgacactacagcccaatcaagttcctagagaagaaagcccagtctctcacgtgtatctggaagttgtgtcaaaacacttttcaaaatcaaagaaaataccaattacctataacaatggaattctcttcatccatacagacaaacctgtttacacgccggaccagtcagtaaagatcagagtctattctctgggtgacgacttgaagccagccaaacgggagactgtcttaactttcatagaccccgaaggatcagaagttgacattgtagaagaaaatgattacaccggaattatctcttttcctgacttcaagattccatctaatcccaagtatggtgtttggacaattaaagctaactataagaaggattttacaacaactggaactgcatactttgaaattaaagaatatgtcttgccacgattctctgtttcaatagaactagaaagaaccttcattggctataaaaactttaagaactttgaaatcactgtgaaagcaagatatttttataataaagtggtacctgatgctgaagtgtatgccttttttggattgagagaggacataaaagatgaggagaagcagatgatgcacaaagccacacaagccgcaaagttggttgacggagttgctcagatctcttttgattctgaaacagcagttaaagagctgtcctacaacagtctagaagacttaaacaacaagtacctttatattgcagtaacagtcacagaatcttcaggtggattttcagaagaggcagaaatccctggagtcaaatatgtcctctctccctacacactgaatttggtcgctactcctcttttcgtgaagcccgggattccattttccatcaaggcacaggttaaagattcactcgagcaggcggtaggaggggtcccagtaactctgatggcacaaacagtcgatgtgaatcaagagacatctgacttggaaacaaagaggagcatcactcatgacactgatggagtagctgtgtttgtgctgaacctcccatcaaatgtgacggtgctaaagtttgagatcagaactgatgacccagaacttcccgaagaaaatcaagccagcaaagagtacgaagcagttgcgtactcgtctctcagccaaagttacatttacatcgcttggactgaaaactacaagcccatgcttgtgggagaatacctgaatattatggttacccccaagagcccatatatcgacaaaataactcactataattacttgattttatccaaaggcaaaattgtacagtacggcacaagagagaaacttttctcctcaacttatcaaaatataaatattccagtgacacagaacatggttccttcagcacgactcctggtctattacatagtcacaggggagcaaacagcagaattagtggctgacgcagtctggataaatattgaggagaagtgtggcaaccagctccaggtccatctgtctccagatgaatatgtgtattctccaggccaaactgtgtcccttgacatggtgactgaagcagactcatgggtagcactatcagcagtggacagagctgtgtataaagtccagggaaacgccaaaagggccatgcaaagagtctttcaagctttggatgaaaagagtgacctgggctgtggggcaggtggtggccatgacaatgcagatgtattccatctagctgggctcaccttcctcaccaacgcaaacgcagatgactcccattatcgtgatgactcttgtaaagaaattctcaggtcaaagagaaacctgcatctcctaaggcagaaaatagaagaacaagctgctaagtacaaacatagtgtgccaaagaaatgctgctatgacggagcccgagtgaacttctacgaaacctgtgaggagcgagtggcccgggttaccataggccctctctgcatcagggccttcaacgagtgctgtactattgcgaacaagatccgaaaagaaagcccccataaacctgtccaactgggaaggatccacattaagaccctgttaccagtgatgaaggcagatatccgaagctactttccagagagctggctatgggaaattcatcgcgttcccaaaagaaaacagctgcaggtcacgctgcctgactcactaacgacttgggaaattcaaggcattggcatttcagacaatggtatatgtgttgctgatacactcaaggcaaaggtgttcaaagaagtcttcctggagatgaacataccatattctgttgtgcgaggagaacagatccaattgaaaggaactgtttacaactatatgacctcagggacaaagttctgtgttaaaatgtctgctgtggaggggatctgcacttcaggaagctcagctgctagccttcacacctccaggccctccagatgtgtgttccagaggatagagggctcgtccagtcacttggtgaccttcaccctgcttcctctggaaattggccttcactccataaacttctcactagagacctcatttgggaaagacatcttagtaaagacattacgggtagtgccagaaggagtcaagagggaaagctatgccggcgtgattctggaccctaagggaattcgtggtattgttaacagacgaaaggaattcccatacaggatcccattagatttggtccccaagaccaaagttgaaaggattttgagtgtcaaaggactgcttgtaggggagttcttgtccacggttctgagtaaggaaggcatcaacatcctaacccacctccccaagggcagtgcagaggcagagctcatgagcatagctccggtgttctatgttttccactacctggaagcaggaaaccattggaatattttctatcctgatacactgagtaaaagacagagcctggagaaaaaaataaaacaaggggtggtgagcgtcatgtcctacagaaacgctgactattcctacagcatgtggaagggggcgagcgctagtacctggctgacagcttttgctctgagagtgcttggacaggtggccaagtatgtaaaacaggatgaaaactcaatttgtaactctttgctatggctggttgagaagtgtcagctggaaaacggctctttcaaggaaaattcccaatatctaccaataaaattacagggtactttgcctgctgaagcccaagagaaaactttgtatcttacagccttttctgtgattggaattagaaaggcagttgacatatgccccaccatgaaaatccacacagcgctagataaagccgactccttcctgcttgaaaacaccctgccatccaagagcaccttcacactggccattgtagcctatgctctttccctaggagacagaacccacccgaggtttcgtctaattgtgtcggccctgaggaaggaagcttttgttaaaggtgatccgcccatttaccgttactggagagataccctcaaacgtccagacagctctgtgcccagcagcggcacagcaggtatggttgaaaccacagcctatgctttgctcgccagcctgaaactgaaggatatgaattacgccaaccccatcatcaagtggctatctgaagagcagaggtatggaggcggcttttattccacccaggatacgattaatgccatcgagggcctgacagaatattcactcctgttaaaacaaattcatttggatatggacatcaatgtcgcctacaaacacgaaggtgacttccacaagtataaggtgacagagaagcatttcctggggaggccagtggaggtatctctcaatgatgaccttgttgtcagcacaggctacagcagtggcttggccacagtatatgtaaaaactgtggttcacaaaattagtgtctctgaggaattttgcagcttttacttgaaaattgatacccaagatattgaagcatccagccacttcaggctcagtgactctggattcaagcgcataatagcatgtgccagctacaagcccagcaaggaggagtcaacatccgggtcctcccatgcagtaatggatatatcactgccgactggaatcggagcaaacgaggaagatttacgggctcttgtggaaggagtggatcaactactaactgattaccagatcaaagatggccatgtcattctgcaactgaattcgatcccctccagagatttcctctgtgtccggttccggatatttgaacttttccaagttgggtttctgaatcctgctaccttcacggtgtacgagtatcacagaccagataagcagtgcaccatgatttatagcatttctgacaccaggcttcagaaagtctgtgaaggagcagcttgcacatgtgtggaagctgactgtgcgcaactgcaggcagaagtagacctagccatctctgcagactccagaaaagagaaagcctgtaaaccagagactgcatatgcttataaagtcaggatcacatcagccactgaagaaaatgtttttgtcaagtacactgcgactcttctggtcacttacaaaacaggggaagctgctgatgagaattcggaggtcaccttcattaaaaagatgagctgtaccaatgccaacctggtgaaagggaagcagtatttaatcatgggcaaagaggttctgcagatcaaacacaatttcagtttcaagtatatataccctctagattcctccacctggattgaatattggcccacagacacaacgtgtccatcctgtcaagcatttgtagagaatttgaataactttgctgaagacctctttttaaacagctgtgaatgaaaagttctgctgcacgaagattcctcctgcggcggggggattgctcctcctctggcttggaaacctagcctagaatcagatacactttctttagagtaaagcacaagctgatgagttacgactttgtgaaatggatagccttgaggggaggcgaaaacaggtcccccaaggctatcagatgtcagtgccaatagactgaaacaagtctgtaaagttagcagtcaggggtgttggttggggccggaagaagagacccactgaaactgtagccccttatcaaaacatatccttgcttgaaagaaaaataccaaggacagaaaatgccataaaatcttgactttgcactc

SEQ ID NO: 4 - DNA, 4497 bp, Rattus norvegicus
atggatagcacagagaccgacagatgtcctacagcccgccatcatctttccggaaacattaactcagtgcttgctgcccttgtaggtgggttttcggaagaggcagaaattcctggcatcaaatacgtcctctctccctatacactgaatttggtcgctacccctcttttcctgaagcctgggattccattttccatcaaggtacaggttaaggattcactcgagcagttggtaggaggggtcccagtaactctgatggcacaaacagtcaatgtgaatcaagagacatctgacttggaaccaaagaggagcatcacacactctgctgatggagtggcttcatttgtggtgaacctcccatcagaagtgacatcactgaagtttgaggtcaaaactgatgccccggaacttcccgaagaaaatcaagccagcaaagaatatgaagcagttacatactcatccctcagccagagttacatttacattggctggactgaaaactacaagcccatgcttgtgggagaatatctgaatattatcgtcacccccaagagtccatatattgacaaaataactcactataattacttgattttatccaaaggcaaaattgtacagtatggcacaaaggagaaacttctctattcatcttatcaaaatataaacatcccagtgacacaggacatggttccttcagcgcggctcctggtctattacatagtcacgggggagcagacagcagaattggtggctgacgcagtctggataaacattgaggagaagtgtggcaaccagctccaggtccatctgtctccagataaagacgtgtattctccaggccaaactgtgtcccttgacatggtgactgaagcagactcatgggtggcactatctgcggtggacagcgctgtgtatggagtccggggaaaagccaaaagggccatgcaaagagtgttccaagcttttgatgacaagagtgacctgggctgtggggcaggtggtggccgtgacaatgtagatgtattccatctagctgggctcaccttcctcaccaatgcaaacgcagatgactcccaataccacgatgactcttgtaaggaaattctcaggccaaagagagacctgcagctcctgcatcagaaagtggaagaacaagctgctaaatacaaacaccgtgtgcccaagaaatgctgttatgatggagcccgagaaaacaaatacgaaacctgtgagcagcgagttgcccgggtgaccataggcccacactgcatcagggccttcaacgagtgttgtactattgcggataagatccgaaaagaaagccaccacaaaggcatgctgttgggaaggatccaaataaaggccctgttaccagtgatgaaggcagaaatccgaagctactttccagagagctggctatgggaagttcatcgtgttcccaaaagaaaccagctgcaggttgcactgcctgactcactgacgacctgggaaattcaaggcatcggcatctcagacaatggtatatgtgttgctgacacactcaaggcaaaggtgttcaaagatgtcttcctggagatgaacataccatattctgttgtacgaggggagcagatccaattgaagggaaccgtttacaattataggacctctgggacaatgttctgtgttaaaatgtctgccgtggagggaatctgcactccaggaagctcggctgctagccctcagacctctaggtcctccagatgtgtgcgccagagaatagagggctcctccagtcacttggtgaccttcagcctgcttcctctggaaattggccttcactccataaacttctcactagagacttcatttgggaaagaaatcttagtgaagacattacgggtagtgccagaagggatcaaaagggaaagctatgctggtgtgactctggaccccaggggagtttatggtattgttaacagacgaaaggaattcccatacaggataccattagatttggtccccaaaaccaacgtcaaaaggattttgagtgtaaaaggactgcttataggggaattcttgtccacggttctgagtaaagaaggcatcgacatcctaacccacctccccaagggcagcgccgaggcagaactcatgagcatagtcccggtgttctacgttttccactacctggaagcaggaaaccattggaatattttccaccctgatacgttagctagaaaacagagcctgcagaaaaaaataaaagaagggctggtgagcgtcatgtcctacagaaacgctgactattcctacagcatgtggaagggagcaagctctagtgcctggctgacagcttttgctctgagagtgcttggacaggtgaacaagtatgtgaaacaagaccaatactcgatctgtaactccttgttatggctgattgagaagtgtcagctggaaaacggatctttcaaggaaaattcccaatatctaccaataaaattacagggtactttgcctgctgaagcccaagagaacactttatatcttacagccttttctgtgattggaattagaaaggctattggcatatgccccacggagaaaatctacacagcgctggctaaagctgactccttcctacttgaaaggaccctgccttccaagagcaccttcaccctggccattgtggcctatgctctctccctgggagacagaacccacccgaagtttcgttctattgtgtcagccctgaagagggaagctttggttaaaggagacccgcccatttaccgtttctggagagacactctccaacgtccagacagctcagcacccaacagcggcacagcaggtatggtagaaaccacggcctatgctttgctcaccagcctgaacctgaaggagacgagttatgtcaacccgatcatcaagtggctatctgaggagcagaggtatggaggcggcttttattccacccaggataccattaacgccatcgagggcctgacagagtattcactcctggttaaacaacttcatttggatatggatatcaatgtctcctacaaacacaaaggggatttctaccagtataaagtgacagagaagaacttcctcgggaggccagtggaggtacccctcaatgatgacctcatcgtcaccacaggctatagcagtggcttggctacagtatatgtaaaaactgtggttcacaaaactagtgtcgctgaggaattttgcagcttttacttgaaaattgatacccaagaagttgaagcctccagctacctcagctacagtgactcgggacacaagcgcataatagcctgtgccagctacaagcccagcaaggaggagtcagcatctgggtcctcccatgcagtaatggatatactgctgccgaccggaatcggagcaaaccaagaagatttacgagctcttgtggaaggagtagatcaactcctaactgattaccagatcaaagacagtcatgttattctgcaattgaattcgattccctccagagatttcctttgtgttcggttccggatatttgaacttttccaagttgggtttctgaatcctgctacgttcacggtgtacgagtatcacagaccagataagcagtgtaccatgatttacagcacttctgacaccaaccttcagagagtctgtgaaggagcggcatgcaaatgcgttgaagctgattgtgggcaactgcaggcagaactggacctggccatctctgcagacaccaggaaagaaacagcatgtaaaccagagattgcatatgcttataaggtcaggatcacgtcggccacggaagaaaacatttttgtcaagtacactgcgacgcttctggatatttacaaaacaggggaagccgctgctgagaaggactctgagatcaccttcattaaaaagataagctgtaccaacgccaacctggtgaaaggaaagcaatatttaatcatgggcaaagaggctctgcagatcaaacacaatttcagtttcaagtatatataccctctagattcctccacctggattgaatattggcccacagacacaacgtgtccatcctgccaagcgtttgtagctaatttggacgagttcgctgaagacatctttctaaatggctgtgaaaatgcctgaggaagttctgctgcgtggccttcccgggtactcctgttggtggctcctaggagccaggatcgcttggaaacttagcctagaatcggatacattttctttatagtaaagcgtaagttgaagagttactttgtgaaacaaaatagccttgtggagagccgaaggcaggtcccccaaggctattggacatcagcaccaataagctggaacaagtctgtaacgttagcagccaggggtgtttgttggggccggaagaagagactcactgaaattgtagccccttaggaaaacatggtcttgcttgaaaaaaaaaataccaaggacagaaaatgccataaaagcttgactttgcactcaactgta

SEQ ID NO: 5 - DNA, 5480 bp, Homo sapiens
ttttttttttttttttttgaaagcaaactcaggctttaatgatcagtttcctgttccttggtattttctttcaagcaaaggccatgtttttgtaatactccctttcaatggactgttctttcggccccagcaaacattcctgagtggtaggtttgaggaggtgttccaatttattgtttccggtgtccaataaccttggaggagtatctgtcttcatgccctccaaggccatgttatttcagaaagttacagcatttgaaatcattctctaataaaagcaagtgccactaattctaagtaaagtgagctttacaaataagaccagctatgaatgtttaaaaaaagaagaaaacaaaaaaacgaacttcaacaacaggagtccataagtgcaaactgtatgcagctgaacttcaggaattttagcatccatttaaaaagatatcttcggcaaattcatctaaattagctaaaaatgcttgacacgatgaacatgttgtgtctctaggccagtattcaatccaggtcaaggaatctaaagggtagatgtacctgaaactgaaattgtattttatctggagggcttctttacccataattaagtactgtcttccttttaccagctcagcgttagtacaggttacctttttaatgaaggtaatctcagagtctttctcagcaacagcttccccagttttgtagatatccagaagggttgccttgtacttgacaaaaacattttctacagtgatggatgtgatgctaactttataagcatatgcaatctctggtttacatgctgtttgttttcttgtctctgcagagattgtcagatccaattcttcctgcatttgcccacaatcagcttctacacacttgcacgcggctccttcacagactttctgaattttgatattggaagtgctataaaacatggtacactgtttatctggtctgtggtattcgtacactgtgaaagtggcaggactgagaaacccaacttcaaagagttcaaatatccggaatcgtacacaaaggaaatcactggagggaatcgaattcagttgcagaataacatgtccatctttgatttggtaatcagtgaatagttgatccaccccttccacaagggcttttaagtcttcttcatttgcactgattccagtaggcaaggagatgtccatcaccgcatgagaggatccagatgatgattcttccctgctgggcttgtagctggcacatgctactatgcgtttgtaatcagagtttccgtagcctctgtagtgggatgcttcaatatcctgagtatcgattttcaaataaaagctgcaaacttcctcagaggtactggttttgtgaactacagttgttacatgtactgtagccaagccactgccaaatcctgtactgacaatgaggtcatcattgagaagcacctctactggcctcccaaggaaattcttgtctgtcattttataattatgtaaggcacctttatgcttgtaagaaacatcgatgtccatactcaagcggagttgtttaaccaggagtgaatattccgtcaggccctcaatggcattgattgtgtcctgggttgaataaaagccacctccatacctctgctcttctgatagccatttgatgactgggttaacataatttatatctttcaagttcagactggtgagtaaagcataggcagttgtttctaccatacgtgccgtaccagtgttaggtacagagctgtctttatgctgaagattgtctttccaaaaacgataaatgggtggattacctttaaccaaagcttctctcttcaaagctgaaacaattgaacgaaactgtgggtgagttttatctcccagggaaagagcatacgcagaaatggccaatgtaaaggtgctctgggctggcagtgtattttcaagcagaaagttgtcagctttaattagagctgtgtcgattttcaccagggggcatatatcgaaagcctttctaattccaatcacagtaaaggctgtaagatataagctgttctctcgggcttcaacaggcaaggtaccctgtaattttattggttgatactgtgaattttccttgaaagatccattatctaattgataattctcaactagccacaataaagaattacaaattgaattttggttctgctctacgtatttatttacttgtccaagtactcttaaagcaaaagctgttaaccaagtgctagcacttccacccttccacacactgtaagagtagtcagcatttctgtaggacataatgctcaacatcccttcttttaattttttcttcagtttctgcttttcaattaatgggtcagaatgaaaaatgttccaatgatttcctgtttccaggtagtgaaaaacatagaatactgggacaacgctcatcagctccgcctctgcactccctttggggaggtgggttaggatattgatgccttcctgacttagaactgcagacaagatctcacctacaagcagtccttttacactcaaaatccttttgatttctgttttggggaccaaatctaagggtatcctgtatgggaactcctttcgtctgctaatggtaccataaatacccctaggatccaaagtaacaccagaatagctttcccttttgacaccttctggcaccactcgtaatgtttttactaagatttcttttccaaaccaagtctccagtgaaaaattgatgttgtgaaggccaatttccagaggaagcacagtgaatgtcaccaagtgactggaggagccctctactttctggcgcacacatttggaggactttgtgccctgatgatcaatgactgggctttccgaagtgcagattccctccacagcagacattttaacacagaactgcatcccagaagtcctatagttgtaaacagttcctttcaattggatctgttctcctcgtacaacagaatatggtatattcatttccaggaagacatctttgaacacctttgccttgacagtatcagcaacacatataccagtgtttgaaatgccaacgccttgaatttcccaggtggttagagaatcaggtagggcaaactgcaactgttttcttctgggaacaagatgaacttcccacaaccagctttctggaaaataactccgaatttctggcttgcttactggtaacagggtcttcatgtgtagccttcccaattgcatgtctttatgagagatattagcacggagctggcttgcgacgacacaacattcagtgaaagctttgatgcatcttggccctaaactaatccgtgcagctcgctgctcacaggtttcatcattattaacgcaggctccatcgtaacaacatttcttcactactgaatgtttatatttagcagctatttcttctatcttcttttgcagcgttcttcttggcctgagaatttctttacaaggttcatcattttcttgggagtcatctgcatttgcattagtgaggaaggtaagtccagctaggtggaacacattggcattgttgaggccaccacctgccccacagcccagatcactcttctctaagaattgaaatactctttccaagggctttttggctcctctttggactccatacacagcactgtccactgctgctaatgccacccaggaatccattccagttgccatattaagagacacagtttggcctggagaatatgcatctgcatcaggagacagatgaacctggagctggttgccacatttttcttcaatatttaaccagactgaatcagacactaattctgctgtctgttctcctgtgacgatgtaatagaccagaagtcgggatgaaggaaccatgttctgtgttactggaatgtttatactttgataagatgcatctgaaaatttctccctcgtgccaaagtggataattttgcccttggataaaatcaagtaattatagtgagttattttgtcaatatatgggcttttgggggtaacaataatattcagatgttctcccactagcaaagccttatggttatcagtccaatcaatataaaggtaactttggctgagagatgagtatgctattgctcggtaaccttccctggcctgattttcttctggaagatctggagcatcagttttgacattaaactccagcaccgtcactccagatgggagattaagcacaaaggaagctactccatcatcaacacgtgttacacttttgcttggatccaagtcagatgtctcttggtttacatcaattgtttgtgcattcagtgttactgggactcctcctaccaactggtcaagcgaatctttaacctgcaccttgatgggatatggaatcccaggcttcaggaaaagaggagtagcaaccaaattcagtttgtagggagagaggacatatttgatgccaggtatttctgcctcttcagaaaatccacctgtagactctatgactgttacagcaatataaaggtacttgttgtttaaatcttctaaactgtagtatgacagttctttgactgctgtttcagaatcaaatgtgacttgagcaattccatttatcaacattgtgttttgcattgctgtttgcatcatttctttttgatcatcttttaagtcttctcttattccaaatgtgatataaacgtcagcctcagtgactactttattataaaaatatcttgcttttatagtaatttcaaaattcttaaagttcttgtaaccaatgaaattatattctggctcgattgagacagaaaaatgtggcaagacatattctttaacttcaaaatatgcggttccagttgttgaaaagtcctctttatatttagccttgatcgtccacataccatatctaggattagacggaatcttgaagtcaggaaaagagataattccaatatgatcaatttcttctaccatgtcaacttctgatccttcaggatctatgaaagttaagacagtttctcttttggctggcttcaagtcgtcattcaacgaataaactctaacttttactgactggtctggagtataaacaggtttgtctgtatgaatgaagagaaatccattgtcataggttattggcattctttttgattttgaaaaatgctttgatacaacttccaaatacacataagaaactgggttttgtcctccaggcaattgttttggttgtattgttaagattgcagagttttggaatttattctctgaggataaatgaacatggcctgaggagtaactaaattttttatcaggataacttttaatagagattgttgcatcaaatgcttcagtgtatccataaacttgaatcacaatattttcagatgctccaacacggaatatttttggtgctgaaatgacatatgtttgctcctgtccccaggttttccccaggaagattaaaaaacaaagtattcccaaaaggcccatggttggaggtagcaggaaaccacggatata

SEQ ID NO: 6 - DNA, 5384 bp, Macaca mulatta
  modified_base (2490)..(2509): a, c, t, g, unknown or other
tttttagcacagtttgaaagcaaactcaggctttaatgatcagtttcctgtcccctggtattttctttcaagcaaaggccatgtttttgtaatactccatttcaatggactgttctttcggctccagcaaacattcctaagtggtaggtttgaggaggtgttctaatttattgtttccggtgtccaataaccttggaggagtatctgtcttcatgccctccaaggccatgttatttcagaaagttacagcgtttaaaatcattctctaataaaagcaagtgccactaattctaagtaaagtgagctttacaaataagaccagctgtgaatgtttaaagacaaaaaaacgagaaaaaaaaacaaacttcaacaacaggagtccataagtgcaaactgtatgcagctgaacttcaggaattttagcatccatttaaaaagatgtcttcagcaaattcatctaaattagctaaaaatgcttgacacgatgaacatgttgtgtctctaggccagtattcaatccaggtcaaggaatctaaagggtagatgtacctgaaagtgaaattgtattttatctggagagcttctttccccataattaagtactgtcttcctttcaccagctcagcgttagtgcaggttacctttttaatgaaggtgatttcagagtctttttcagcaacagcttccccagttttgtagatatccagaagggttgccttgtacttgacaaaaacattttctgtagtgatggatgtgatgataactttataagcatatgcaatctctgggttacatgctgtttgttttctagtctctgcagagattgtcagatccaattctttctgcatttgcccacaatcagcttctatacacttgcacgtggctccttcacagactttctgaattttgatattggaagtgctataaaacatggtacactgtttatctggtctgtggtattcatacactgtgaaagtggcaggactaagaaacccaacttcaaagagttcaaaaatccggaatcgtacacaaaggaaatcactggaggggatcgaattcagttgcagaataacatgtccatcttttatttggtaatcagtgaatagctgatccaccccttccacaagagcttttaagtcttcttcatttgcattgattccagtaggcaaggagatgtccatcactgcatgagaggatccagaagatgattcttccttgctgggcttgtagctggcacatgctactatgcgtttgtaatcagagtttccgtagcctctgtagtgggatgcttcaatatcctgagtatcaattttcaaataaaagctgcaaacttcctcagaggtactggttttgtgaactacagttgttacatgtaccgtagccaagccactgccaaatcctgtactgacaacgaggtcatcattgagaagcacctctactggcctcccaaggaaattcttgtctgtcattttataattatgtaagggacctttatgcttgtaagcaacatcgatgtccatattcaagcggagctgtttaaccaggagtgaatattctgtcaggccctcgatggcattgattgtgtcctgggttgaataaaagccacctccatacctctgctcttctgatagccatttgatgattgggttaacataatttatgtctttcaagttcagactggtgagtaaagcataggcagttgtttctaccatacgtgctgtaccagtgttaggtacagagctgtctttatgttgaagactgtctttccaaaaacgataaatgggtggattacctttaaccaaagcttctctcttcaaagctgaaacaattgaacaaaactgtgggtgagttttatctcccagggaaagagcataggcagaaatggccaatgtaaaggtgctctgggctggcagtgtattttcaagcagaaaggtgtcagctttaattagagctgtgttgattttctgtaattttattggttgatactgtgaattttccttgaaggatccattatctaactgataattctcaaccagccacaataaagaattacatattgaattttggttctgctctacatatttatgtacttgtccaagtactcttaaagcaaaagctgttaaccaagtgctagcactgccacccttccacacgctgtaagaatagtcagcatttctgtaggacataatgctcaccatcccttcttttaattttttctccaggttccgcttttcaattaatgggtcggaatgaaaaatgttccaatgatttcctgtttccaggtagtgaaaaacatagaatactgggacaacgctcatcagctccgcctctgcactccctttggggaggtgggttaggatattgatgccttcccgacttagaactgcagacaagatctcacctacaagcagtccttttacactcaaaatccttttgatttctgttttggggaccaaatctaatggtatcctgtatgggaactcctttcgnnnnnnnnnnnnnnnnnnnncataaatacccctaggatccaaagtaataccagaatagctttcccttttgacaccttctggcaccactcgtaacgattttactaagatttcttttccaaacgaagtctccagtgagaaattgatgttctgaaggccaatttccagaggaagcacagtaaaggtcaccaagtgattagaggagccctctactttctgtcgcacacatttggaggactttgtgccctgatgatcaatgactgggctttctgaagtgcagattccctccacagcagacattttaacacagaactgcatcccagaagtcctatagttgtaaacagttcctttcaactggacctgttctcctcgtacaacagaatatggtatattcatttccaggaagacatctttgaacacctttgccttaatagtatcagcaacacatataccactgtttgaaatgccaacaccttgaatttcccaggtagttacagaatcaggtagggcaaactgcaactgttttcttctgggaacaagatgaacttcccataaccagctttctggaaaataactccgaatttctggcttgcttactggtaacagggtcttcatgtgtagccttcccaattgcaagtctttatgagagttattagcacggagctggcttgcgacgacacaacattcagtgaaagctttgacgcatctcggccctacactaatccgtgcagctcgctgctcacaggtttcatcatgattaatacggactccatcgtaacaacatttcttcactactaaatgtttatatttagcagctatttcttctatcttctcttgtagcattcttcttggcctgataatttctttacaaggttcatcattttcttgggagtcatctgcatttgcattagtgaggaaggtaagtccagctaggtggaacacattggcattgttgaggccaccacctgccccacagcccagatcactcttctctaagaattgaaatactctttccaagggctttttggctcttctttggactccatacacagcgctgtccactgctgttaatgccacccaggaatccatcccagttaccatattaagagacacagtttggcctggagaatatgtatctgcatcaggagacagatgaacctggagctggttgccacatttttcttcaatatttaaccagactgaatcagacactaattctgctgtctgctctcctgtgacgatgtaatagaccaggagtcgggatgaaggaaccatgttctgcgttactggaatgtttatactttgataagatgcatctgaaagtttctcccttgtgccaaagtggataattttgcccttggataaaatcaagtaattatagtgagttattttgtcaatatatgggcttttgggggtaacaataatattcaaatattctcccactagcaaagccttgtggttatcagtccaatcgatataaaggtaactttggctgagagatgagtatgctattgctcggtaaccttccctggcctgattttcgtctggaagatctggagcatcagttttgacattaaactccagcaccgtcactccagatgggagattaaccacaaacgaagctactccatcatcaacacgtgttacacttttccttggctccaagtcagatgtctcttggttgacatcaattgtttgtgcattcagtgttactgggacccctcctaccaactggtcaagcgcatctttaacctgcaccttgatggaatatggaatcccaggcttcaggaaaagaggagtagcaaccaaattcagtttgtagggagagaggacatatttgatgccaggtatttctgcctcttcagaaaatccacctgtagactctatgactgttacagcaatataaaggtacttgttgtttaaatcttctaaactgtagtatgacagttctttgactgctgtttcagaatcaaatgtgacttgagcaattccatttatcaacattgtgttttgcattgctgtttgcatcatttctttttgatcatcttttaagtcttctcttattccaaatgtgatataaacatcagcctcagtgactactttattataaaaatatcttgcttttatagtaatttcaaaattcttaaagttcttataaccaatgaaattactttctggttctactgagacagaaaaatgtggcaagacatattctttaacttcaaaaaatgcagttccagttgttgaaaagtcctctttatatttagcctggatcatccacataccatatctaggattagacggaatcttgaagtcaggaaaagagataattccaatatgatcaatttcttctaccatgtcaatttctgatccttcaggatctatgaaagttaagacagtttctcttttggctggcttcaagtcatcattcaacgaataaactctaacctttactgattggtctggagtataaacaggtttgtctgtatgaatgaagagaaatccattgtcataggttattggaattttttttgattttgaaaaatgctttgatacaacttccaaatacacataagaaacttggttttgtcctccaggtaattgttttggttgtattgttaagactgccgagttttggaatttattctctgaggataaatgaacatggcctgaggagtaactaaattttttatcaggataacttttaatagagattgttgcatcaaatgcttcagtgtatccataaacttgaatcacaatgttttcagatgctccaacacggaatatttttggtgctgaaatgacatatgtttgctcctgtccccaagtttttcccaggaagattaaaaaacaaagtattcccaaaaggcccatggttggaggtagcaggaaatcatg

SEQ ID NO: 7 - DNA, 5448 bp, Mus musculus
gagtgcaaagtcaagattttatggcattttctgtccttggtatttttctttcaagcaaggatatgttttgataaggggctacagtttcagtgggtctcttcttccggccccaaccaacacccctgactgctaactttacagacttgtttcagtctattggcactgacatctgatagccttgggggacctgttttcgcctcccctcaaggctatccatttcacaaagtcgtaactcatcagcttgtgctttactctaaagaaagtgtatctgattctaggctaggtttccaagccagaggaggagcaatccccccgccgcaggaggaatcttcgtgcagcagaacttttcattcacagctgtttaaaaagaggtcttcagcaaagttattcaaattctctacaaatgcttgacaggatggacacgttgtgtctgtgggccaatattcaatccaggtggaggaatctagagggtatatatacttgaaactgaaattgtgtttgatctgcagaacctctttgcccatgattaaatactgcttccctttcaccaggttggcattggtacagctcatctttttaatgaaggtgacctccgaattctcatcagcagcttcccctgttttgtaagtgaccagaagagtcgcagtgtacttgacaaaaacattttcttcagtggctgatgtgatcctgactttataagcatatgcagtctctggtttacaggctttctcttttctggagtctgcagagatggctaggtctacttctgcctgcagttgcgcacagtcagcttccacacatgtgcaagctgctccttcacagactttctgaagcctggtgtcagaaatgctataaatcatggtgcactgcttatctggtctgtgatactcgtacaccgtgaaggtagcaggattcagaaacccaacttggaaaagttcaaatatccggaaccggacacagaggaaatctctggaggggatcgaattcagttgcagaatgacatggccatctttgatctggtaatcagttagtagttgatccactccttccacaagagcccgtaaatcttcctcgtttgctccgattccagtcggcagtgatatatccattactgcatgggaggacccggatgttgactcctccttgctgggcttgtagctggcacatgctattatgcgcttgaatccagagtcactgagcctgaagtggctggatgcttcaatatcttgggtatcaattttcaagtaaaagctgcaaaattcctcagagacactaattttgtgaaccacagtttttacatatactgtggccaagccactgctgtagcctgtgctgacaacaaggtcatcattgagagatacctccactggcctccccaggaaatgcttctctgtcaccttatacttgtggaagtcaccttcgtgtttgtaggcgacattgatgtccatatccaaatgaatttgttttaacaggagtgaatattctgtcaggccctcgatggcattaatcgtatcctgggtggaataaaagccgcctccatacctctgctcttcagatagccacttgatgatggggttggcgtaattcatatccttcagtttcaggctggcgagcaaagcataggctgtggtttcaaccatacctgctgtgccgctgctgggcacagagctgtctggacgtttgagggtatctctccagtaacggtaaatgggcggatcacctttaacaaaagcttccttcctcagggccgacacaattagacgaaacctcgggtgggttctgtctcctagggaaagagcataggctacaatggccagtgtgaaggtgctcttggatggcagggtgttttcaagcaggaaggagtcggctttatctagcgctgtgtggattttcatggtggggcatatgtcaactgcctttctaattccaatcacagaaaaggctgtaagatacaaagttttctcttgggcttcagcaggcaaagtaccctgtaattttattggtagatattgggaattttccttgaaagagccgttttccagctgacacttctcaaccagccatagcaaagagttacaaattgagttttcatcctgttttacatacttggccacctgtccaagcactctcagagcaaaagctgtcagccaggtactagcgctcgcccccttccacatgctgtaggaatagtcagcgtttctgtaggacatgacgctcaccaccccttgttttatttttttctccaggctctgtcttttactcagtgtatcaggatagaaaatattccaatggtttcctgcttccaggtagtggaaaacatagaacaccggagctatgctcatgagctctgcctctgcactgcccttggggaggtgggttaggatgttgatgccttccttactcagaaccgtggacaagaactcccctacaagcagtcctttgacactcaaaatcctttcaactttggtcttggggaccaaatctaatgggatcctgtatgggaattcctttcgtctgttaacaataccacgaattcccttagggtccagaatcacgccggcatagctttccctcttgactccttctggcactacccgtaatgtctttactaagatgtctttcccaaatgaggtctctagtgagaagtttatggagtgaaggccaatttccagaggaagcagggtgaaggtcaccaagtgactggacgagccctctatcctctggaacacacatctggagggcctggaggtgtgaaggctagcagctgagcttcctgaagtgcagatcccctccacagcagacattttaacacagaactttgtccctgaggtcatatagttgtaaacagttcctttcaattggatctgttctcctcgcacaacagaatatggtatgttcatctccaggaagacttctttgaacacctttgccttgagtgtatcagcaacacatataccattgtctgaaatgccaatgccttgaatttcccaagtcgttagtgagtcaggcagcgtgacctgcagctgttttcttttgggaacgcgatgaatttcccatagccagctctctggaaagtagcttcggatatctgccttcatcactggtaacagggtcttaatgtggatccttcccagttggacaggtttatgggggctttcttttcggatcttgttcgcaatagtacagcactcgttgaaggccctgatgcagagagggcctatggtaacccgggccactcgctcctcacaggtttcgtagaagttcactcgggctccgtcatagcagcatttctttggcacactatgtttgtacttagcagcttgttcttctattttctgccttaggagatgcaggtttctctttgacctgagaatttctttacaagagtcatcacgataatgggagtcatctgcgtttgcgttggtgaggaaggtgagcccagctagatggaatacatctgcattgtcatggccaccacctgccccacagcccaggtcactcttttcatccaaagcttgaaagactctttgcatggcccttttggcgtttccctggactttatacacagctctgtccactgctgatagtgctacccatgagtctgcttcagtcaccatgtcaagggacacagtttggcctggagaatacacatattcatctggagacagatggacctggagctggttgccacacttctcctcaatatttatccagactgcgtcagccactaattctgctgtttgctcccctgtgactatgtaatagaccaggagtcgtgctgaaggaaccatgttctgtgtcactggaatatttatattttgataagttgaggagaaaagtttctctcttgtgccgtactgtacaattttgcctttggataaaatcaagtaattatagtgagttattttgtcgatatatgggctcttgggggtaaccataatattcaggtattctcccacaagcatgggcttgtagttttcagtccaagcgatgtaaatgtaactttggctgagagacgagtacgcaactgcttcgtactctttgctggcttgattttcttcgggaagttctgggtcatcagttctgatctcaaactttagcaccgtcacatttgatgggaggttcagcacaaacacagctactccatcagtgtcatgagtgatgctcctctttgtttccaagtcagatgtctcttgattcacatcgactgtttgtgccatcagagttactgggacccctcctaccgcctgctcgagtgaatctttaacctgtgccttgatggaaaatggaatcccgggcttcacgaaaagaggagtagcgaccaaattcagtgtgtagggagagaggacatatttgactccagggatttctgcctcttctgaaaatccacctgaagattctgtgactgttactgcaatataaaggtacttgttgtttaagtcttctagactgttgtaggacagctctttaactgctgtttcagaatcaaaagagatctgagcaactccgtcaaccaactttgcggcttgtgtggctttgtgcatcatctgcttctcctcatcttttatgtcctctctcaatccaaaaaaggcatacacttcagcatcaggtaccactttattataaaaatatcttgctttcacagtgatttcaaagttcttaaagtttttatagccaatgaaggttctttctagttctattgaaacagagaatcgtggcaagacatattctttaatttcaaagtatgcagttccagttgttgtaaaatccttcttatagttagctttaattgtccaaacaccatacttgggattagatggaatcttgaagtcaggaaaagagataattccggtgtaatcattttcttctacaatgtcaacttctgatccttcggggtctatgaaagttaagacagtctcccgtttggctggcttcaagtcgtcacccagagaatagactctgatctttactgactggtccggcgtgtaaacaggtttgtctgtatggatgaagagaattccattgttataggtaattggtattttctttgattttgaaaagtgttttgacacaacttccagatacacgtgagagactgggctttcttctctaggaacttgattgggctgtagtgtcaacagtgccgcgttttggaatttgttttccggggacaaattaacatagcctgaagagaaggtgacttttttgtcaggatagctttttagagaaagagttgcatcaaatgcttcagtgtagccatggacttgaattaccacattttcagacgagccgacccggaggattttgggtgctgaaatgacgtaggtttgttcctgtccccaagttttgtccaggaaaattaaaagacaaagtattccccaaagacccatggctggtagcggcataaacccatgggcatggcctccctgtaaccactttccttttaaa

SEQ ID NO: 8 - DNA, 4497 bp, Rattus norvegicus
tacagttgagtgcaaagtcaagcttttatggcattttctgtccttggtattttttttttcaagcaagaccatgttttcctaaggggctacaatttcagtgagtctcttcttccggccccaacaaacacccctggctgctaacgttacagacttgttccagcttattggtgctgatgtccaatagccttgggggacctgccttcggctctccacaaggctattttgtttcacaaagtaactcttcaacttacgctttactataaagaaaatgtatccgattctaggctaagtttccaagcgatcctggctcctaggagccaccaacaggagtacccgggaaggccacgcagcagaacttcctcaggcattttcacagccatttagaaagatgtcttcagcgaactcgtccaaattagctacaaacgcttggcaggatggacacgttgtgtctgtgggccaatattcaatccaggtggaggaatctagagggtatatatacttgaaactgaaattgtgtttgatctgcagagcctctttgcccatgattaaatattgctttcctttcaccaggttggcgttggtacagcttatctttttaatgaaggtgatctcagagtccttctcagcagcggcttcccctgttttgtaaatatccagaagcgtcgcagtgtacttgacaaaaatgttttcttccgtggccgacgtgatcctgaccttataagcatatgcaatctctggtttacatgctgtttctttcctggtgtctgcagagatggccaggtccagttctgcctgcagttgcccacaatcagcttcaacgcatttgcatgccgctccttcacagactctctgaaggttggtgtcagaagtgctgtaaatcatggtacactgcttatctggtctgtgatactcgtacaccgtgaacgtagcaggattcagaaacccaacttggaaaagttcaaatatccggaaccgaacacaaaggaaatctctggagggaatcgaattcaattgcagaataacatgactgtctttgatctggtaatcagttaggagttgatctactccttccacaagagctcgtaaatcttcttggtttgctccgattccggtcggcagcagtatatccattactgcatgggaggacccagatgctgactcctccttgctgggcttgtagctggcacaggctattatgcgcttgtgtcccgagtcactgtagctgaggtagctggaggcttcaacttcttgggtatcaattttcaagtaaaagctgcaaaattcctcagcgacactagttttgtgaaccacagtttttacatatactgtagccaagccactgctatagcctgtggtgacgatgaggtcatcattgaggggtacctccactggcctcccgaggaagttcttctctgtcactttatactggtagaaatcccctttgtgtttgtaggagacattgatatccatatccaaatgaagttgtttaaccaggagtgaatactctgtcaggccctcgatggcgttaatggtatcctgggtggaataaaagccgcctccatacctctgctcctcagatagccacttgatgatcgggttgacataactcgtctccttcaggttcaggctggtgagcaaagcataggccgtggtttctaccatacctgctgtgccgctgttgggtgctgagctgtctggacgttggagagtgtctctccagaaacggtaaatgggcgggtctcctttaaccaaagcttccctcttcagggctgacacaatagaacgaaacttcgggtgggttctgtctcccagggagagagcataggccacaatggccagggtgaaggtgctcttggaaggcagggtcctttcaagtaggaaggagtcagctttagccagcgctgtgtagattttctccgtggggcatatgccaatagcctttctaattccaatcacagaaaaggctgtaagatataaagtgttctcttgggcttcagcaggcaaagtaccctgtaattttattggtagatattgggaattttccttgaaagatccgttttccagctgacacttctcaatcagccataacaaggagttacagatcgagtattggtcttgtttcacatacttgttcacctgtccaagcactctcagagcaaaagctgtcagccaggcactagagcttgctcccttccacatgctgtaggaatagtcagcgtttctgtaggacatgacgctcaccagcccttcttttatttttttctgcaggctctgttttctagctaacgtatcagggtggaaaatattccaatggtttcctgcttccaggtagtggaaaacgtagaacaccgggactatgctcatgagttctgcctcggcgctgcccttggggaggtgggttaggatgtcgatgccttctttactcagaaccgtggacaagaattcccctataagcagtccttttacactcaaaatccttttgacgttggttttggggaccaaatctaatggtatcctgtatgggaattcctttcgtctgttaacaataccataaactcccctggggtccagagtcacaccagcatagctttcccttttgatcccttctggcactacccgtaatgtcttcactaagatttctttcccaaatgaagtctctagtgagaagtttatggagtgaaggccaatttccagaggaagcaggctgaaggtcaccaagtgactggaggagccctctattctctggcgcacacatctggaggacctagaggtctgagggctagcagccgagcttcctggagtgcagattccctccacggcagacattttaacacagaacattgtcccagaggtcctataattgtaaacggttcccttcaattggatctgctcccctcgtacaacagaatatggtatgttcatctccaggaagacatctttgaacacctttgccttgagtgtgtcagcaacacatataccattgtctgagatgccgatgccttgaatttcccaggtcgtcagtgagtcaggcagtgcaacctgcagctggtttcttttgggaacacgatgaacttcccatagccagctctctggaaagtagcttcggatttctgccttcatcactggtaacagggcctttatttggatccttcccaacagcatgcctttgtggtggctttcttttcggatcttatccgcaatagtacaacactcgttgaaggccctgatgcagtgtgggcctatggtcacccgggcaactcgctgctcacaggtttcgtatttgttttctcgggctccatcataacagcatttcttgggcacacggtgtttgtatttagcagcttgttcttccactttctgatgcaggagctgcaggtctctctttggcctgagaatttccttacaagagtcatcgtggtattgggagtcatctgcgtttgcattggtgaggaaggtgagcccagctagatggaatacatctacattgtcacggccaccacctgccccacagcccaggtcactcttgtcatcaaaagcttggaacactctttgcatggcccttttggcttttccccggactccatacacagcgctgtccaccgcagatagtgccacccatgagtctgcttcagtcaccatgtcaagggacacagtttggcctggagaatacacgtctttatctggagacagatggacctggagctggttgccacacttctcctcaatgtttatccagactgcgtcagccaccaattctgctgtctgctcccccgtgactatgtaatagaccaggagccgcgctgaaggaaccatgtcctgtgtcactgggatgtttatattttgataagatgaatagagaagtttctcctttgtgccatactgtacaattttgcctttggataaaatcaagtaattatagtgagttattttgtcaatatatggactcttgggggtgacgataatattcagatattctcccacaagcatgggcttgtagttttcagtccagccaatgtaaatgtaactctggctgagggatgagtatgtaactgcttcatattctttgctggcttgattttcttcgggaagttccggggcatcagttttgacctcaaacttcagtgatgtcacttctgatgggaggttcaccacaaatgaagccactccatcagcagagtgtgtgatgctcctctttggttccaagtcagatgtctcttgattcacattgactgtttgtgccatcagagttactgggacccctcctaccaactgctcgagtgaatccttaacctgtaccttgatggaaaatggaatcccaggcttcaggaaaagaggggtagcgaccaaattcagtgtatagggagagaggacgtatttgatgccaggaatttctgcctcttccgaaaacccacctacaagggcagcaagcactgagttaatgtttccggaaagatgatggcgggctgtaggacatctgtcggtctctgtgctatccat

SEQ ID NO: 9 - protein, 16 aa, Unknown
  source: /note="Description of Unknown: RFGF peptide"
AAVALLPAVLLALLAP

SEQ ID NO: 10 - protein, 11 aa, Unknown
  source: /note="Description of Unknown: RFGF analogue peptide"
AALLPVLLAAP

SEQ ID NO: 11 - protein, 13 aa, Human immunodeficiency virus
GRKKRRQRRRPPQ

SEQ ID NO: 12 - protein, 16 aa, Drosophila sp.
RQIKIWFQNRRMKWKK

SEQ ID NO: 13 - DNA, 21 bp, Artificial Sequence
  source: /note="Description of Artificial Sequence: Synthetic oligonucleotide"
  source: /note="Description of Combined DNA/RNA Molecule: Synthetic oligonucleotide"
cuuacgcugaguacuucgatt

SEQ ID NO: 14 - DNA, 21 bp, Artificial Sequence
  source: /note="Description of Artificial Sequence: Synthetic oligonucleotide"
  source: /note="Description of Combined DNA/RNA Molecule: Synthetic oligonucleotide"
ucgaaguacucagcguaagtt

SEQ ID NO: 15 - RNA, 21 nt, Artificial Sequence
  source: /note="Description of Artificial Sequence: Synthetic oligonucleotide"
aauaacucacuauaauuacuu

SEQ ID NO: 16 - RNA, 21 nt, Artificial Sequence
  source: /note="Description of Artificial Sequence: Synthetic oligonucleotide"
ugacaaaauaacucacuauaa

SEQ ID NO: 17 - RNA, 21 nt, Artificial Sequence
  source: /note="Description of Artificial Sequence: Synthetic oligonucleotide"
cuuccucuggaaauuggccuu

SEQ ID NO: 18 - RNA, 21 nt, Artificial Sequence
  source: /note="Description of Artificial Sequence: Synthetic oligonucleotide"
gacaaaauaacucacuauaau

SEQ ID NO: 19 - RNA, 21 nt, Artificial Sequence
  source: /note="Description of Artificial Sequence: Synthetic oligonucleotide"
uccucuggaaauuggccuuca

SEQ ID NO: 20 - RNA, 21 nt, Artificial Sequence
  source: /note="Description of Artificial Sequence: Synthetic oligonucleotide"
aagcaagauauuuuuauaaua

SEQ ID NO: 21 - RNA, 21 nt, Artificial Sequence
  source: /note="Description of Artificial Sequence: Synthetic oligonucleotide"
aaaauguuuuugucaaguaca

SEQ ID NO: 22 - RNA, 21 nt, Artificial Sequence
  source: /note="Description of Artificial Sequence: Synthetic oligonucleotide"
auuuaaacaacaaguaccuuu

SEQ ID NO: 23 - RNA, 21 nt, Artificial Sequence
  source: /note="Description of Artificial Sequence: Synthetic oligonucleotide"
auucagaaagucugugaagga

SEQ ID NO: 24 - RNA, 21 nt, Artificial Sequence
  source: /note="Description of Artificial Sequence: Synthetic oligonucleotide"
acacugaagcauuugaugcaa

SEQ ID NO: 25 - RNA, 21 nt, Artificial Sequence
  source: /note="Description of Artificial Sequence: Synthetic oligonucleotide"
gcaguucuguguuaaaauguc

SEQ ID NO: 26 - RNA, 21 nt, Artificial Sequence
  source: /note="Description of Artificial Sequence: Synthetic oligonucleotide"
aggauuuugaguguaaaagga

SEQ ID NO: 27 - RNA, 21 nt, Artificial Sequence
  source: /note="Description of Artificial Sequence: Synthetic oligonucleotide"
aaugaugaaccuuguaaagaa

SEQ ID NO: 28 - RNA, 21 nt, Artificial Sequence
  source: /note="Description of Artificial Sequence: Synthetic oligonucleotide"
aucauuggaacauuuuucauu

SEQ ID NO: 29 - RNA, 21 nt, Artificial Sequence
  source: /note="Description of Artificial Sequence: Synthetic oligonucleotide"
agccagaaauucggaguuauu

SEQ ID NO: 30 - RNA, 21 nt, Artificial Sequence
  source: /note="Description of Artificial Sequence: Synthetic oligonucleotide"
ucccugggagauaaaacucac

SEQ ID NO: 31 - RNA, 21 nt, Artificial Sequence
  source: /note="Description of Artificial Sequence: Synthetic oligonucleotide"
gaaaaugaugaaccuuguaaa

SEQ ID NO: 32 - RNA, 21 nt, Artificial Sequence
  source: /note="Description of Artificial Sequence: Synthetic oligonucleotide"
auugcucaagucacauuugau

SEQ ID NO: 33 - RNA, 21 nt, Artificial Sequence
  source: /note="Description of Artificial Sequence: Synthetic oligonucleotide"
gagauugcauaugcuuauaaa

SEQ ID NO: 34 - RNA, 21 nt, Artificial Sequence
  source: /note="Description of Artificial Sequence: Synthetic oligonucleotide"
guuauccugauaaaaaauuua

SEQ ID NO: 35 - RNA, 21 nt, Artificial Sequence
  source: /note="Description of Artificial Sequence: Synthetic oligonucleotide"
aggaaguuugcagcuuuuauu

SEQ ID NO: 36 - RNA, 21 nt, Artificial Sequence
  source: /note="Description of Artificial Sequence: Synthetic oligonucleotide"
gaagaaauugaucauauugga

SEQ ID NO: 37 - RNA, 21 nt, Artificial Sequence
  source: /note="Description of Artificial Sequence: Synthetic oligonucleotide"
auccugauaaaaaauuuaguu

SEQ ID NO: 38 - RNA, 21 nt, Artificial Sequence
  source: /note="Description of Artificial Sequence: Synthetic oligonucleotide"
uggaaaagaaaucuuaguaaa

SEQ ID NO: 39 - RNA, 21 nt, Artificial Sequence
  source: /note="Description of Artificial Sequence: Synthetic oligonucleotide"
ucuuaucaaaguauaaacauu

SEQ ID NO: 40 - RNA, 21 nt, Artificial Sequence
  source: /note="Description of Artificial Sequence: Synthetic oligonucleotide"
ucccuacaaacugaauuuggu

SEQ ID NO: 41 - RNA, 21 nt, Artificial Sequence
  source: /note="Description of Artificial Sequence: Synthetic oligonucleotide"
caggagcaaacauaugucauu

SEQ ID NO: 42 - RNA, 21 nt, Artificial Sequence
  source: /note="Description of Artificial Sequence: Synthetic oligonucleotide"
acauguaacaacuguaguuca

SEQ ID NO: 43 - RNA, 21 nt, Artificial Sequence
  source: /note="Description of Artificial Sequence: Synthetic oligonucleotide"
caggaaaucauuggaacauuu

SEQ ID NO: 44 - RNA, 21 nt, Artificial Sequence
  source: /note="Description of Artificial Sequence: Synthetic oligonucleotide"
uuuaagaauuuugaaauuacu

SEQ ID NO: 45 - RNA, 21 nt, Artificial Sequence
  source: /note="Description of Artificial Sequence: Synthetic oligonucleotide"
uauucugcaacugaauucgau

SEQ ID NO: 46 - RNA, 21 nt, Artificial Sequence
  source: /note="Description of Artificial Sequence: Synthetic oligonucleotide"
gcccuuggaaagaguauuuca

SEQ ID NO: 47 - RNA, 21 nt, Artificial Sequence
  source: /note="Description of Artificial Sequence: Synthetic oligonucleotide"
ccugauaaaaaauuuaguuac

SEQ ID NO: 48 - RNA, 21 nt, Artificial Sequence
  source: /note="Description of Artificial Sequence: Synthetic oligonucleotide"
cccuuggaaagaguauuucaa

SEQ ID NO: 49 - RNA, 21 nt, Artificial Sequence
  source: /note="Description of Artificial Sequence: Synthetic oligonucleotide"
ugcagaucaaacacaauuuca

SEQ ID NO: 50 - RNA, 21 nt, Artificial Sequence
  source: /note="Description of Artificial Sequence: Synthetic oligonucleotide"
cagaucaaacacaauuucagu

SEQ ID NO: 51 - RNA, 21 nt, Artificial Sequence
  source: /note="Description of Artificial Sequence: Synthetic oligonucleotide"
guuccggauauuugaacuuuu

SEQ ID NO: 52 - RNA, 21 nt, Artificial Sequence
  source: /note="Description of Artificial Sequence: Synthetic oligonucleotide"
auuuaaacaacaaguaccuuu

SEQ ID NO: 53 - RNA, 21 nt, Artificial Sequence
  source: /note="Description of Artificial Sequence: Synthetic oligonucleotide"
auuuaaacaacaaguaccuuu

SEQ ID NO: 54 - RNA, 21 nt, Artificial Sequence
  source: /note="Description of Artificial Sequence: Synthetic oligonucleotide"
ugacaaaauaacucacuauaa

SEQ ID NO: 55 - RNA, 21 nt, Artificial Sequence
  source: /note="Description of Artificial Sequence: Synthetic oligonucleotide"
ugacaaaauaacucacuauaa

SEQ ID NO: 56 - RNA, 21 nt, Artificial Sequence
  source: /note="Description of Artificial Sequence: Synthetic oligonucleotide"
gacaaaauaacucacuauaau

SEQ ID NO: 57 - RNA, 21 nt, Artificial Sequence
  source: /note="Description of Artificial Sequence: Synthetic oligonucleotide"
gacaaaauaacucacuauaau

SEQ ID NO: 58 - RNA, 21 nt, Artificial Sequence
  source: /note="Description of Artificial Sequence: Synthetic oligonucleotide"
guuccggauauuugaacuuuu

SEQ ID NO: 59 - RNA, 21 nt, Artificial Sequence
  source: /note="Description of Artificial Sequence: Synthetic oligonucleotide"
guuccggauauuugaacuuuu

SEQ ID NO: 60 - RNA, 21 nt, Artificial Sequence
  source: /note="Description of Artificial Sequence: Synthetic oligonucleotide"
ugcagaucaaacacaauuuca

SEQ ID NO: 61 - RNA, 21 nt, Artificial Sequence
  source: /note="Description of Artificial Sequence: Synthetic oligonucleotide"
ugcagaucaaacacaauuuca

SEQ ID NO: 62 - RNA, 21 nt, Artificial Sequence
  source: /note="Description of Artificial Sequence: Synthetic oligonucleotide"
aagcaagauauuuuuauaaua

SEQ ID NO: 63 - RNA, 21 nt, Artificial Sequence
  source: /note="Description of Artificial Sequence: Synthetic oligonucleotide"
aagcaagauauuuuuauaaua

SEQ ID NO: 64 - RNA, 21 nt, Artificial Sequence
  source: /note="Description of Artificial Sequence: Synthetic oligonucleotide"
cagaucaaacacaauuucagu

SEQ ID NO: 65 - RNA, 21 nt, Artificial Sequence
  source: /note="Description of Artificial Sequence: Synthetic oligonucleotide"
cagaucaaacacaauuucagu

SEQ ID NO: 66 - RNA, 23 nt, Artificial Sequence
  source: /note="Description of Artificial Sequence: Synthetic oligonucleotide"
aaguaauuauagugaguuauuuu

SEQ ID NO: 67 - RNA, 23 nt, Artificial Sequence
  source: /note="Description of Artificial Sequence: Synthetic oligonucleotide"
uuauagugaguuauuuugucaau

SEQ ID NO: 68 - RNA, 23 nt, Artificial Sequence
  source: /note="Description of Artificial Sequence: Synthetic oligonucleotide"
aaggccaauuuccagaggaagca

SEQ ID NO: 69 - RNA, 23 nt, Artificial Sequence
  source: /note="Description of Artificial Sequence: Synthetic oligonucleotide"
auuauagugaguuauuuugucaa

SEQ ID NO: 70 - RNA, 23 nt, Artificial Sequence
  source: /note="Description of Artificial Sequence: Synthetic oligonucleotide"
ugaaggccaauuuccagaggaag

SEQ ID NO: 71 - RNA, 23 nt, Artificial Sequence
  source: /note="Description of Artificial Sequence: Synthetic oligonucleotide"
uauuauaaaaauaucuugcuuuu

SEQ ID NO: 72 - RNA, 23 nt, Artificial Sequence
  source: /note="Description of Artificial Sequence: Synthetic oligonucleotide"
uguacuugacaaaaacauuuucu

SEQ ID NO: 73 - RNA, 23 nt, Artificial Sequence
  source: /note="Description of Artificial Sequence: Synthetic oligonucleotide"
aaagguacuuguuguuuaaaucu

SEQ ID NO: 74 - RNA, 23 nt, Artificial Sequence
  source: /note="Description of Artificial Sequence: Synthetic oligonucleotide"
uccuucacagacuuucugaauuu

SEQ ID NO: 75 - RNA, 23 nt, Artificial Sequence
  source: /note="Description of Artificial Sequence: Synthetic oligonucleotide"
uugcaucaaaugcuucaguguau

SEQ ID NO: 76 - RNA, 23 nt, Artificial Sequence
  source: /note="Description of Artificial Sequence: Synthetic oligonucleotide"
gacauuuuaacacagaacugcau

SEQ ID NO: 77 - RNA, 23 nt, Artificial Sequence
  source: /note="Description of Artificial Sequence: Synthetic oligonucleotide"
uccuuuuacacucaaaauccuuu

SEQ ID NO: 78 - RNA, 23 nt, Artificial Sequence
  source: /note="Description of Artificial Sequence: Synthetic oligonucleotide"
uucuuuacaagguucaucauuuu

SEQ ID NO: 79 - RNA, 23 nt, Artificial Sequence
  source: /note="Description of Artificial Sequence: Synthetic oligonucleotide"
aaugaaaaauguuccaaugauuu

SEQ ID NO: 80 - RNA, 23 nt, Artificial Sequence
  source: /note="Description of Artificial Sequence: Synthetic oligonucleotide"
aauaacuccgaauuucuggcuug

SEQ ID NO: 81 - RNA, 23 nt, Artificial Sequence
  source: /note="Description of Artificial Sequence: Synthetic oligonucleotide"
gugaguuuuaucucccagggaaa

SEQ ID NO: 82 - RNA, 23 nt, Artificial Sequence
  source: /note="Description of Artificial Sequence: Synthetic oligonucleotide"
uuuacaagguucaucauuuucuu

SEQ ID NO: 83 - RNA, 23 nt, Artificial Sequence
  source: /note="Description of Artificial Sequence: Synthetic oligonucleotide"
aucaaaugugacuugagcaauuc

SEQ ID NO: 84 - RNA, 23 nt, Artificial Sequence
  source: /note="Description of Artificial Sequence: Synthetic oligonucleotide"
uuuauaagcauaugcaaucucug

SEQ ID NO: 85 - RNA, 23 nt, Artificial Sequence
  source: /note="Description of Artificial Sequence: Synthetic oligonucleotide"
uaaauuuuuuaucaggauaacuu

SEQ ID NO: 86 - RNA, 23 nt, Artificial Sequence
  source: /note="Description of Artificial Sequence: Synthetic oligonucleotide"
aauaaaagcugcaaacuuccuca

SEQ ID NO: 87 - RNA, 23 nt, Artificial Sequence
  source: /note="Description of Artificial Sequence: Synthetic oligonucleotide"
uccaauaugaucaauuucuucua

SEQ ID NO: 88 - RNA, 23 nt, Artificial Sequence
  source: /note="Description of Artificial Sequence: Synthetic oligonucleotide"
aacuaaauuuuuuaucaggauaa

SEQ ID NO: 89 - RNA, 23 nt, Artificial Sequence
  source: /note="Description of Artificial Sequence: Synthetic oligonucleotide"
uuuacuaagauuucuuuuccaaa

SEQ ID NO: 90 - RNA, 23 nt, Artificial Sequence
  source: /note="Description of Artificial Sequence: Synthetic oligonucleotide"
aauguuuauacuuugauaagaug

SEQ ID NO: 91 - RNA, 23 nt, Artificial Sequence
  source: /note="Description of Artificial Sequence: Synthetic oligonucleotide"
accaaauucaguuuguagggaga

SEQ ID NO: 92 - RNA, 23 nt, Artificial Sequence
  source: /note="Description of Artificial Sequence: Synthetic oligonucleotide"
aaugacauauguuugcuccuguc

SEQ ID NO: 93 - RNA, 23 nt, Artificial Sequence
  source: /note="Description of Artificial Sequence: Synthetic oligonucleotide"
ugaacuacaguuguuacauguac

SEQ ID NO: 94 - RNA, 23 nt, Artificial Sequence
  source: /note="Description of Artificial Sequence: Synthetic oligonucleotide"
aaauguuccaaugauuuccuguu

SEQ ID NO: 95 - RNA, 23 nt, Artificial Sequence
  source: /note="Description of Artificial Sequence: Synthetic oligonucleotide"
aguaauuucaaaauucuuaaagu

SEQ ID NO: 96 - RNA, 23 nt, Artificial Sequence
  source: /note="Description of Artificial Sequence: Synthetic oligonucleotide"
aucgaauucaguugcagaauaac

SEQ ID NO: 97 - RNA, 23 nt, Artificial Sequence
  source: /note="Description of Artificial Sequence: Synthetic oligonucleotide"
ugaaauacucuuuccaagggcuu

SEQ ID NO: 98 - RNA, 23 nt, Artificial Sequence
  source: /note="Description of Artificial Sequence: Synthetic oligonucleotide"
guaacuaaauuuuuuaucaggau

SEQ ID NO: 99 - RNA, 23 nt, Artificial Sequence
  source: /note="Description of Artificial Sequence: Synthetic oligonucleotide"
uugaaauacucuuuccaagggcu

SEQ ID NO: 100 - RNA, 23 nt, Artificial Sequence
  source: /note="Description of Artificial Sequence: Synthetic oligonucleotide"
ugaaauuguguuugaucugcaga

SEQ ID NO: 101 - RNA, 23 nt, Artificial Sequence
  source: /note="Description of Artificial Sequence: Synthetic oligonucleotide"
acugaaauuguguuugaucugca

SEQ ID NO: 102 - RNA, 23 nt, Artificial Sequence
  source: /note="Description of Artificial Sequence: Synthetic oligonucleotide"
aaaaguucaaauauccggaaccg

SEQ ID NO: 103 - RNA, 23 nt, Artificial Sequence
  source: /note="Description of Artificial Sequence: Synthetic oligonucleotide"
aaagguacuuguuguuuaaaucu

SEQ ID NO: 104 - RNA, 23 nt, Artificial Sequence
  source: /note="Description of Artificial Sequence: Synthetic oligonucleotide"
aaagguacuuguuguuuaaaucu

SEQ ID NO: 105 - RNA, 23 nt, Artificial Sequence
  source: /note="Description of Artificial Sequence: Synthetic oligonucleotide"
uuauagugaguuauuuugucaau

SEQ ID NO: 106 - RNA, 23 nt, Artificial Sequence
  source: /note="Description of Artificial Sequence: Synthetic oligonucleotide"
uuauagugaguuauuuugucaau

SEQ ID NO: 107 - RNA, 23 nt, Artificial Sequence
  source: /note="Description of Artificial Sequence: Synthetic oligonucleotide"
auuauagugaguuauuuugucaa

SEQ ID NO: 108 - RNA, 23 nt, Artificial Sequence
  source: /note="Description of Artificial Sequence: Synthetic oligonucleotide"
auuauagugaguuauuuugucaa

SEQ ID NO: 109 - RNA, 23 nt, Artificial Sequence
  source: /note="Description of Artificial Sequence: Synthetic oligonucleotide"
aaaaguucaaauauccggaaccg

SEQ ID NO: 110 - RNA, 23 nt, Artificial Sequence
  source: /note="Description of Artificial Sequence: Synthetic oligonucleotide"
aaaaguucaaauauccggaaccg

SEQ ID NO: 111 - RNA, 23 nt, Artificial Sequence
  source: /note="Description of Artificial Sequence: Synthetic oligonucleotide"
ugaaauuguguuugaucugcaga

SEQ ID NO: 112 - RNA, 23 nt, Artificial Sequence
  source: /note="Description of Artificial Sequence: Synthetic oligonucleotide"
ugaaauuguguuugaucugcaga

SEQ ID NO: 113 - RNA, 23 nt, Artificial Sequence
  source: /note="Description of Artificial Sequence: Synthetic oligonucleotide"
uauuauaaaaauaucuugcuuuu

SEQ ID NO: 114 - RNA, 23 nt, Artificial Sequence
  source: /note="Description of Artificial Sequence: Synthetic oligonucleotide"
uauuauaaaaauaucuugcuuuu

SEQ ID NO: 115 - RNA, 23 nt, Artificial Sequence
  source: /note="Description of Artificial Sequence: Synthetic oligonucleotide"
acugaaauuguguuugaucugca

SEQ ID NO: 116 - RNA, 23 nt, Artificial Sequence
  source: /note="Description of Artificial Sequence: Synthetic oligonucleotide"
acugaaauuguguuugaucugca

SEQ ID NO: 117 - RNA, 21 nt, Artificial Sequence
  source: /note="Description of Artificial Sequence: Synthetic oligonucleotide"
aauaacucacuauaauuacuu

SEQ ID NO: 118 - RNA, 21 nt, Artificial Sequence
  source: /note="Description of Artificial Sequence: Synthetic oligonucleotide"
ugacaaaauaacucacuauaa

SEQ ID NO: 119 - RNA, 21 nt, Artificial Sequence
  source: /note="Description of Artificial Sequence: Synthetic oligonucleotide"
cuuccucuggaaauuggccuu

SEQ ID NO: 120 - RNA, 21 nt, Artificial Sequence
  source: /note="Description of Artificial Sequence: Synthetic oligonucleotide"
gacaaaauaacucacuauaau

SEQ ID NO: 121 - RNA, 21 nt, Artificial Sequence
  source: /note="Description of Artificial Sequence: Synthetic oligonucleotide"
uccucuggaaauuggccuuca

SEQ ID NO: 122 - RNA, 21 nt, Artificial Sequence
  source: /note="Description of Artificial Sequence: Synthetic oligonucleotide"
aagcaagauauuuuuauaaua

SEQ ID NO: 123 - RNA, 21 nt, Artificial Sequence
  source: /note="Description of Artificial Sequence: Synthetic oligonucleotide"
aaaauguuuuugucaaguaca

SEQ ID NO: 124 - RNA, 21 nt, Artificial Sequence
  source: /note="Description of Artificial Sequence: Synthetic oligonucleotide"
auuuaaacaacaaguaccuuu

SEQ ID NO: 125 - RNA, 21 nt, Artificial Sequence
  source: /note="Description of Artificial Sequence: Synthetic oligonucleotide"
auucagaaagucugugaagga

SEQ ID NO: 126 - RNA, 21 nt, Artificial Sequence
  source: /note="Description of Artificial Sequence: Synthetic oligonucleotide"
acacugaagcauuugaugcaa

SEQ ID NO: 127 - RNA, 21 nt, Artificial Sequence
  source: /note="Description of Artificial Sequence: Synthetic oligonucleotide"
gcaguucuguguuaaaauguc

SEQ ID NO: 128 - RNA, 21 nt, Artificial Sequence
  source: /note="Description of Artificial Sequence: Synthetic oligonucleotide"
aggauuuugaguguaaaagga

SEQ ID NO: 129 - RNA, 21 nt, Artificial Sequence
  source: /note="Description of Artificial Sequence: Synthetic oligonucleotide"
aaugaugaaccuuguaaagaa

SEQ ID NO: 130 - RNA, 21 nt, Artificial Sequence
  source: /note="Description of Artificial Sequence: Synthetic oligonucleotide"
aucauuggaacauuuuucauu

SEQ ID NO: 131 - RNA, 21 nt, Artificial Sequence
  source: /note="Description of Artificial Sequence: Synthetic oligonucleotide"
agccagaaauucggaguuauu

SEQ ID NO: 132 - RNA, 21 nt, Artificial Sequence
  source: /note="Description of Artificial Sequence: Synthetic oligonucleotide"
ucccugggagauaaaacucac

SEQ ID NO: 133 - RNA, 21 nt, Artificial Sequence
  source: /note="Description of Artificial Sequence: Synthetic oligonucleotide"
gaaaaugaugaaccuuguaaa

SEQ ID NO: 134 - RNA, 21 nt, Artificial Sequence
  source: /note="Description of Artificial Sequence: Synthetic oligonucleotide"
auugcucaagucacauuugau

SEQ ID NO: 135 - RNA, 21 nt, Artificial Sequence
  source: /note="Description of Artificial Sequence: Synthetic oligonucleotide"
gagauugcauaugcuuauaaa

SEQ ID NO: 136 - RNA, 21 nt, Artificial Sequence
  source: /note="Description of Artificial Sequence: Synthetic oligonucleotide"
guuauccugauaaaaaauuua

SEQ ID NO: 137 - RNA, 21 nt, Artificial Sequence
  source: /note="Description of Artificial Sequence: Synthetic oligonucleotide"
aggaaguuugcagcuuuuauu

SEQ ID NO: 138 - RNA, 21 nt, Artificial Sequence
  source: /note="Description of Artificial Sequence: Synthetic oligonucleotide"
gaagaaauugaucauauugga

SEQ ID NO: 139 - RNA, 21 nt, Artificial Sequence
  source: /note="Description of Artificial Sequence: Synthetic oligonucleotide"
auccugauaaaaaauuuaguu

SEQ ID NO: 140 - RNA, 21 nt, Artificial Sequence
  source: /note="Description of Artificial Sequence: Synthetic oligonucleotide"
uggaaaagaaaucuuaguaaa

SEQ ID NO: 141 - RNA, 21 nt, Artificial Sequence
  source: /note="Description of Artificial Sequence: Synthetic oligonucleotide"
ucuuaucaaaguauaaacauu

SEQ ID NO: 142 - RNA, 21 nt, Artificial Sequence
  source: /note="Description of Artificial Sequence: Synthetic oligonucleotide"
ucccuacaaacugaauuuggu

SEQ ID NO: 143 - RNA, 21 nt, Artificial Sequence
  source: /note="Description of Artificial Sequence: Synthetic oligonucleotide"
caggagcaaacauaugucauu

SEQ ID NO: 144 - RNA, 21 nt, Artificial Sequence
  source: /note="Description of Artificial Sequence: Synthetic oligonucleotide"
acauguaacaacuguaguuca

SEQ ID NO: 145 - RNA, 21 nt, Artificial Sequence
  source: /note="Description of Artificial Sequence: Synthetic oligonucleotide"
caggaaaucauuggaacauuu

SEQ ID NO: 146 - RNA, 21 nt, Artificial Sequence
  source: /note="Description of Artificial Sequence: Synthetic oligonucleotide"
uuuaagaauuuugaaauuacu

SEQ ID NO: 147 - RNA, 21 nt, Artificial Sequence
  source: /note="Description of Artificial Sequence: Synthetic oligonucleotide"
uauucugcaacugaauucgau

SEQ ID NO: 148 - RNA, 21 nt, Artificial Sequence
  source: /note="Description of Artificial Sequence: Synthetic oligonucleotide"
gcccuuggaaagaguauuuca

SEQ ID NO: 149 - RNA, 21 nt, Artificial Sequence
  source: /note="Description of Artificial Sequence: Synthetic oligonucleotide"
ccugauaaaaaauuuaguuac

SEQ ID NO: 150 - RNA, 21 nt, Artificial Sequence
  source: /note="Description of Artificial Sequence: Synthetic oligonucleotide"
cccuuggaaagaguauuucaa

SEQ ID NO: 151 - RNA, 21 nt, Artificial Sequence
  source: /note="Description of Artificial Sequence: Synthetic oligonucleotide"
ugcagaucaaacacaauuuca

SEQ ID NO: 152 - RNA, 21 nt, Artificial Sequence
  source: /note="Description of Artificial Sequence: Synthetic oligonucleotide"
cagaucaaacacaauuucagu

SEQ ID NO: 153 - RNA, 21 nt, Artificial Sequence
  source: /note="Description of Artificial Sequence: Synthetic oligonucleotide"
guuccggauauuugaacuuuu

SEQ ID NO: 154 - RNA, 21 nt, Artificial Sequence
  source: /note="Description of Artificial Sequence: Synthetic oligonucleotide"
auuuaaacaacaaguaccuuu

SEQ ID NO: 155 - RNA, 21 nt, Artificial Sequence
  source: /note="Description of Artificial Sequence: Synthetic oligonucleotide"
auuuaaacaacaaguaccuuu

SEQ ID NO: 156 - RNA, 21 nt, Artificial Sequence
  source: /note="Description of Artificial Sequence: Synthetic oligonucleotide"
ugacaaaauaacucacuauaa

SEQ ID NO: 157 - RNA, 21 nt, Artificial Sequence
  source: /note="Description of Artificial Sequence: Synthetic oligonucleotide"
ugacaaaauaacucacuauaa

SEQ ID NO: 158 - RNA, 21 nt, Artificial Sequence
  source: /note="Description of Artificial Sequence: Synthetic oligonucleotide"
gacaaaauaacucacuauaau

SEQ ID NO: 159 - RNA, 21 nt, Artificial Sequence
  source: /note="Description of Artificial Sequence: Synthetic oligonucleotide"
gacaaaauaacucacuauaau

SEQ ID NO: 160 - RNA, 21 nt, Artificial Sequence
  source: /note="Description of Artificial Sequence: Synthetic oligonucleotide"
guuccggauauuugaacuuuu

SEQ ID NO: 161 - RNA, 21 nt, Artificial Sequence
  source: /note="Description of Artificial Sequence: Synthetic oligonucleotide"
guuccggauauuugaacuuuu

SEQ ID NO: 162 - RNA, 21 nt, Artificial Sequence
  source: /note="Description of Artificial Sequence: Synthetic oligonucleotide"
ugcagaucaaacacaauuuca

SEQ ID NO: 163 - RNA, 21 nt, Artificial Sequence
  source: /note="Description of Artificial Sequence: Synthetic oligonucleotide"
ugcagaucaaacacaauuuca

SEQ ID NO: 164 - RNA, 21 nt, Artificial Sequence
  source: /note="Description of Artificial Sequence: Synthetic oligonucleotide"
aagcaagauauuuuuauaaua

SEQ ID NO: 165 - RNA, 21 nt, Artificial Sequence
  source: /note="Description of Artificial Sequence: Synthetic oligonucleotide"
aagcaagauauuuuuauaaua

SEQ ID NO: 166 - RNA, 21 nt, Artificial Sequence
  source: /note="Description of Artificial Sequence: Synthetic oligonucleotide"
cagaucaaacacaauuucagu

SEQ ID NO: 167 - RNA, 21 nt, Artificial Sequence
  source: /note="Description of Artificial Sequence: Synthetic oligonucleotide"
cagaucaaacacaauuucagu

SEQ ID NO: 168 - RNA, 23 nt, Artificial Sequence
  source: /note="Description of Artificial Sequence: Synthetic oligonucleotide"
aaguaauuauagugaguuauuuu

SEQ ID NO: 169 - RNA, 23 nt, Artificial Sequence
  source: /note="Description of Artificial Sequence: Synthetic oligonucleotide"
uuauagugaguuauuuugucaau

SEQ ID NO: 170 - RNA, 23 nt, Artificial Sequence
  source: /note="Description of Artificial Sequence: Synthetic oligonucleotide"
aaggccaauuuccagaggaagca

SEQ ID NO: 171 - RNA, 23 nt, Artificial Sequence
  source: /note="Description of Artificial Sequence: Synthetic oligonucleotide"
auuauagugaguuauuuugucaa

SEQ ID NO: 172 - RNA, 23 nt, Artificial Sequence
  source: /note="Description of Artificial Sequence: Synthetic oligonucleotide"
ugaaggccaauuuccagaggaag

SEQ ID NO: 173 - RNA, 23 nt, Artificial Sequence
  source: /note="Description of Artificial Sequence: Synthetic oligonucleotide"
uauuauaaaaauaucuugcuuuu

SEQ ID NO: 174 - RNA, 23 nt, Artificial Sequence
  source: /note="Description of Artificial Sequence: Synthetic oligonucleotide"
uguacuugacaaaaacauuuucu

SEQ ID NO: 175 - RNA, 23 nt, Artificial Sequence
  source: /note="Description of Artificial Sequence: Synthetic oligonucleotide"
aaagguacuuguuguuuaaaucu

SEQ ID NO: 176 - RNA, 23 nt, Artificial Sequence
  source: /note="Description of Artificial Sequence: Synthetic oligonucleotide"
uccuucacagacuuucugaauuu

SEQ ID NO: 177 - RNA, 23 nt, Artificial Sequence
  source: /note="Description of Artificial Sequence: Synthetic oligonucleotide"
uugcaucaaaugcuucaguguau

SEQ ID NO: 178 - RNA, 23 nt, Artificial Sequence
  source: /note="Description of Artificial Sequence: Synthetic oligonucleotide"
gacauuuuaacacagaacugcau

SEQ ID NO: 179 - RNA, 23 nt, Artificial Sequence
  source: /note="Description of Artificial Sequence: Synthetic oligonucleotide"
uccuuuuacacucaaaauccuuu

SEQ ID NO: 180 - RNA, 23 nt, Artificial Sequence
  source: /note="Description of Artificial Sequence: Synthetic oligonucleotide"
uucuuuacaagguucaucauuuu

SEQ ID NO: 181 - RNA, 23 nt, Artificial Sequence
  source: /note="Description of Artificial Sequence: Synthetic oligonucleotide"
aaugaaaaauguuccaaugauuu

SEQ ID NO: 182 - RNA, 23 nt, Artificial Sequence
  source: /note="Description of Artificial Sequence: Synthetic oligonucleotide"
aauaacuccgaauuucuggcuug

SEQ ID NO: 183 - RNA, 23 nt, Artificial Sequence
  source: /note="Description of Artificial Sequence: Synthetic oligonucleotide"
gugaguuuuaucucccagggaaa

SEQ ID NO: 184 - RNA, 23 nt, Artificial Sequence
  source: /note="Description of Artificial Sequence: Synthetic oligonucleotide"
uuuacaagguucaucauuuucuu

SEQ ID NO: 185 - RNA, 23 nt, Artificial Sequence
  source: /note="Description of Artificial Sequence: Synthetic oligonucleotide"
aucaaaugugacuugagcaauuc

SEQ ID NO: 186 - RNA, 23 nt, Artificial Sequence
  source: /note="Description of Artificial Sequence: Synthetic oligonucleotide"
uuuauaagcauaugcaaucucug

SEQ ID NO: 187 - RNA, 23 nt, Artificial Sequence
  source: /note="Description of Artificial Sequence: Synthetic oligonucleotide"
uaaauuuuuuaucaggauaacuu

SEQ ID NO: 188 - RNA, 23 nt, Artificial Sequence
  source: /note="Description of Artificial Sequence: Synthetic oligonucleotide"
aauaaaagcugcaaacuuccuca

SEQ ID NO: 189 - RNA, 23 nt, Artificial Sequence
  source: /note="Description of Artificial Sequence: Synthetic oligonucleotide"
uccaauaugaucaauuucuucua

SEQ ID NO: 190 - RNA, 23 nt, Artificial Sequence
  source: /note="Description of Artificial Sequence: Synthetic oligonucleotide"
aacuaaauuuuuuaucaggauaa

SEQ ID NO: 191 - RNA, 23 nt, Artificial Sequence
  source: /note="Description of Artificial Sequence: Synthetic oligonucleotide"
uuuacuaagauuucuuuuccaaa

SEQ ID NO: 192 - RNA, 23 nt, Artificial Sequence
  source: /note="Description of Artificial Sequence: Synthetic oligonucleotide"
aauguuuauacuuugauaagaug

SEQ ID NO: 193 - RNA, 23 nt, Artificial Sequence
  source: /note="Description of Artificial Sequence: Synthetic oligonucleotide"
accaaauucaguuuguagggaga

SEQ ID NO: 194 - RNA, 23 nt, Artificial Sequence
  source: /note="Description of Artificial Sequence: Synthetic oligonucleotide"
aaugacauauguuugcuccuguc

SEQ ID NO: 195 - RNA, 23 nt, Artificial Sequence
  source: /note="Description of Artificial Sequence: Synthetic oligonucleotide"
ugaacuacaguuguuacauguac

SEQ ID NO: 196 - RNA, 23 nt, Artificial Sequence
  source: /note="Description of Artificial Sequence: Synthetic oligonucleotide"
aaauguuccaaugauuuccuguu

SEQ ID NO: 197 - RNA, 23 nt, Artificial Sequence
  source: /note="Description of Artificial Sequence: Synthetic oligonucleotide"
aguaauuucaaaauucuuaaagu

SEQ ID NO: 198 - RNA, 23 nt, Artificial Sequence
  source: /note="Description of Artificial Sequence: Synthetic oligonucleotide"
aucgaauucaguugcagaauaac

SEQ ID NO: 199 - RNA, 23 nt, Artificial Sequence
  source: /note="Description of Artificial Sequence: Synthetic oligonucleotide"
ugaaauacucuuuccaagggcuu

SEQ ID NO: 200 - RNA, 23 nt, Artificial Sequence
  source: /note="Description of Artificial Sequence: Synthetic oligonucleotide"
guaacuaaauuuuuuaucaggau

SEQ ID NO: 201 - RNA, 23 nt, Artificial Sequence
  source: /note="Description of Artificial Sequence: Synthetic oligonucleotide"
uugaaauacucuuuccaagggcu

SEQ ID NO: 202 - RNA, 23 nt, Artificial Sequence
  source: /note="Description of Artificial Sequence: Synthetic oligonucleotide"
ugaaauuguguuugaucugcaga

SEQ ID NO: 203 - RNA, 23 nt, Artificial Sequence
  source: /note="Description of Artificial Sequence: Synthetic oligonucleotide"
acugaaauuguguuugaucugca

SEQ ID NO: 204 - RNA, 23 nt, Artificial Sequence
  source: /note="Description of Artificial Sequence: Synthetic oligonucleotide"
aaaaguucaaauauccggaaccg

SEQ ID NO: 205 - RNA, 23 nt, Artificial Sequence
  source: /note="Description of Artificial Sequence: Synthetic oligonucleotide"
aaagguacuuguuguuuaaaucu

SEQ ID NO: 206 - RNA, 23 nt, Artificial Sequence
  source: /note="Description of Artificial Sequence: Synthetic oligonucleotide"
aaagguacuuguuguuuaaaucu

SEQ ID NO: 207 - RNA, 23 nt, Artificial Sequence
  source: /note="Description of Artificial Sequence: Synthetic oligonucleotide"
uuauagugaguuauuuugucaau

SEQ ID NO: 208 - RNA, 23 nt, Artificial Sequence
  source: /note="Description of Artificial Sequence: Synthetic oligonucleotide"
uuauagugaguuauuuugucaau

SEQ ID NO: 209 - RNA, 23 nt, Artificial Sequence
  source: /note="Description of Artificial Sequence: Synthetic oligonucleotide"
auuauagugaguuauuuugucaa

SEQ ID NO: 210 - RNA, 23 nt, Artificial Sequence
  source: /note="Description of Artificial Sequence: Synthetic oligonucleotide"
auuauagugaguuauuuugucaa

SEQ ID NO: 211 - RNA, 23 nt, Artificial Sequence
  source: /note="Description of Artificial Sequence: Synthetic oligonucleotide"
aaaaguucaaauauccggaaccg

SEQ ID NO: 212 - RNA, 23 nt, Artificial Sequence
  source: /note="Description of Artificial Sequence: Synthetic oligonucleotide"
aaaaguucaaauauccggaaccg

SEQ ID NO: 213 - RNA, 23 nt, Artificial Sequence
  source: /note="Description of Artificial Sequence: Synthetic oligonucleotide"
ugaaauuguguuugaucugcaga

SEQ ID NO: 214 - RNA, 23 nt, Artificial Sequence
  source: /note="Description of Artificial Sequence: Synthetic oligonucleotide"
ugaaauuguguuugaucugcaga

SEQ ID NO: 215 - RNA, 23 nt, Artificial Sequence
  source: /note="Description of Artificial Sequence: Synthetic oligonucleotide"
uauuauaaaaauaucuugcuuuu

SEQ ID NO: 216 - RNA, 23 nt, Artificial Sequence
  source: /note="Description of Artificial Sequence: Synthetic oligonucleotide"
uauuauaaaaauaucuugcuuuu

SEQ ID NO: 217 - RNA, 23 nt, Artificial Sequence
  source: /note="Description of Artificial Sequence: Synthetic oligonucleotide"
acugaaauuguguuugaucugca

SEQ ID NO: 218 - RNA, 23 nt, Artificial Sequence
  source: /note="Description of Artificial Sequence: Synthetic oligonucleotide"
acugaaauuguguuugaucugca

SEQ ID NO: 219 - RNA, 19 nt, Artificial Sequence
  source: /note="Description of Artificial Sequence: Synthetic oligonucleotide"
cacuauaauuacuugauuu

SEQ ID NO: 220 - RNA, 19 nt, Artificial Sequence
  source: /note="Description of Artificial Sequence: Synthetic oligonucleotide"
uaacucacuauaauuacuu

SEQ ID NO: 221 - RNA, 19 nt, Artificial Sequence
  source: /note="Description of Artificial Sequence: Synthetic oligonucleotide"
acaaaauaacucacuauaa

SEQ ID NO: 222 - RNA, 19 nt, Artificial Sequence
  source: /note="Description of Artificial Sequence: Synthetic oligonucleotide"
uccucuggaaauuggccuu

SEQ ID NO: 223 - RNA, 19 nt, Artificial Sequence
  source: /note="Description of Artificial Sequence: Synthetic oligonucleotide"
caaaauaacucacuauaau

SEQ ID NO: 224 - RNA, 19 nt, Artificial Sequence
  source: /note="Description of Artificial Sequence: Synthetic oligonucleotide"
cucuggaaauuggccuuca

SEQ ID NO: 225 - RNA, 19 nt, Artificial Sequence
  source: /note="Description of Artificial Sequence: Synthetic oligonucleotide"
gcaagauauuuuuauaaua

SEQ ID NO: 226 - RNA, 19 nt, Artificial Sequence
  source: /note="Description of Artificial Sequence: Synthetic oligonucleotide"
aauguuuuugucaaguaca

SEQ ID NO: 227 - RNA, 19 nt, Artificial Sequence
  source: /note="Description of Artificial Sequence: Synthetic oligonucleotide"
uuaaacaacaaguaccuuu

SEQ ID NO: 228 - RNA, 19 nt, Artificial Sequence
  source: /note="Description of Artificial Sequence: Synthetic oligonucleotide"
ucagaaagucugugaagga

SEQ ID NO: 229 - RNA, 19 nt, Artificial Sequence
  source: /note="Description of Artificial Sequence: Synthetic oligonucleotide"
acugaagcauuugaugcaa

SEQ ID NO: 230 - RNA, 19 nt, Artificial Sequence
  source: /note="Description of Artificial Sequence: Synthetic oligonucleotide"
aguucuguguuaaaauguc

SEQ ID NO: 231 - RNA, 19 nt, Artificial Sequence
  source: /note="Description of Artificial Sequence: Synthetic oligonucleotide"
gauuuugaguguaaaagga

SEQ ID NO: 232 - RNA, 19 nt, Artificial Sequence
  source: /note="Description of Artificial Sequence: Synthetic oligonucleotide"
ugaugaaccuuguaaagaa

SEQ ID NO: 233 - RNA, 19 nt, Artificial Sequence
  source: /note="Description of Artificial Sequence: Synthetic oligonucleotide"
cauuggaacauuuuucauu

SEQ ID NO: 234 - RNA, 19 nt, Artificial Sequence
  source: /note="Description of Artificial Sequence: Synthetic oligonucleotide"
ccagaaauucggaguuauu

SEQ ID NO: 235 - RNA, 19 nt, Artificial Sequence
  source: /note="Description of Artificial Sequence: Synthetic oligonucleotide"
ccugggagauaaaacucac

SEQ ID NO: 236 - RNA, 19 nt, Artificial Sequence
  source: /note="Description of Artificial Sequence: Synthetic oligonucleotide"
aaaugaugaaccuuguaaa

SEQ ID NO: 237 - RNA, 19 nt, Artificial Sequence
  source: /note="Description of Artificial Sequence: Synthetic oligonucleotide"
ugcucaagucacauuugau

SEQ ID NO: 238 - RNA, 19 nt, Artificial Sequence
  source: /note="Description of Artificial Sequence: Synthetic oligonucleotide"
gauugcauaugcuuauaaa

SEQ ID NO: 239 - RNA, 19 nt, Artificial Sequence
  source: /note="Description of Artificial Sequence: Synthetic oligonucleotide"
uauccugauaaaaaauuua

SEQ ID NO: 240 - RNA, 19 nt, Artificial Sequence
  source: /note="Description of Artificial Sequence: Synthetic oligonucleotide"
gaaguuugcagcuuuuauu

SEQ ID NO: 241 - RNA, 19 nt, Artificial Sequence
  source: /note="Description of Artificial Sequence: Synthetic oligonucleotide"
agaaauugaucauauugga

SEQ ID NO: 242 - RNA, 19 nt, Artificial Sequence
  source: /note="Description of Artificial Sequence: Synthetic oligonucleotide"
ccugauaaaaaauuuaguu

SEQ ID NO: 243 - RNA, 19 nt, Artificial Sequence
  source: /note="Description of Artificial Sequence: Synthetic oligonucleotide"
gaaaagaaaucuuaguaaa

SEQ ID NO: 244 - RNA, 19 nt, Artificial Sequence
  source: /note="Description of Artificial Sequence: Synthetic oligonucleotide"
uuaucaaaguauaaacauu

SEQ ID NO: 245 - RNA, 19 nt, Artificial Sequence
  source: /note="Description of Artificial Sequence: Synthetic oligonucleotide"
ccuacaaacugaauuuggu

SEQ ID NO: 246 - RNA, 19 nt, Artificial Sequence
  source: /note="Description of Artificial Sequence: Synthetic oligonucleotide"
ggagcaaacauaugucauu

SEQ ID NO: 247 - RNA, 19 nt, Artificial Sequence
  source: /note="Description of Artificial Sequence: Synthetic oligonucleotide"
auguaacaacuguaguuca

SEQ ID NO: 248 - RNA, 19 nt, Artificial Sequence
  source: /note="Description of Artificial Sequence: Synthetic oligonucleotide"
ggaaaucauuggaacauuu

SEQ ID NO: 249 - RNA, 19 nt, Artificial Sequence
  source: /note="Description of Artificial Sequence: Synthetic oligonucleotide"
uaagaauuuugaaauuacu

SEQ ID NO: 250 - RNA, 19 nt, Artificial Sequence
  source: /note="Description of Artificial Sequence: Synthetic oligonucleotide"
uucugcaacugaauucgau

SEQ ID NO: 251 - RNA, 19 nt, Artificial Sequence
  source: /note="Description of Artificial Sequence: Synthetic oligonucleotide"
ccuuggaaagaguauuuca

SEQ ID NO: 252 - RNA, 19 nt, Artificial Sequence
  source: /note="Description of Artificial Sequence: Synthetic oligonucleotide"
ugauaaaaaauuuaguuac

SEQ ID NO: 253 - RNA, 19 nt, Artificial Sequence
  source: /note="Description of Artificial Sequence: Synthetic oligonucleotide"
cuuggaaagaguauuucaa

SEQ ID NO: 254 - RNA, 19 nt, Artificial Sequence
  source: /note="Description of Artificial Sequence: Synthetic oligonucleotide"
cacuauaauuacuugauuu

SEQ ID NO: 255 - RNA, 19 nt, Artificial Sequence
  source: /note="Description of Artificial Sequence: Synthetic oligonucleotide"
uaacucacuauaauuacuu

SEQ ID NO: 256 - RNA, 19 nt, Artificial Sequence
  source: /note="Description of Artificial Sequence: Synthetic oligonucleotide"
acaaaauaacucacuauaa

SEQ ID NO: 257 - RNA, 19 nt, Artificial Sequence
  source: /note="Description of Artificial Sequence: Synthetic oligonucleotide"
uccucuggaaauuggccuu

SEQ ID NO: 258 - RNA, 19 nt, Artificial Sequence
  source: /note="Description of Artificial Sequence: Synthetic oligonucleotide"
caaaauaacucacuauaau

SEQ ID NO: 259 - RNA, 19 nt, Artificial Sequence
  source: /note="Description of Artificial Sequence: Synthetic oligonucleotide"
cucuggaaauuggccuuca

SEQ ID NO: 260 - RNA, 19 nt, Artificial Sequence
  source: /note="Description of Artificial Sequence: Synthetic oligonucleotide"
gcaagauauuuuuauaaua

SEQ ID NO: 261 - RNA, 19 nt, Artificial Sequence
  source: /note="Description of Artificial Sequence: Synthetic oligonucleotide"
aauguuuuugucaaguaca

SEQ ID NO: 262 - RNA, 19 nt, Artificial Sequence
  source: /note="Description of Artificial Sequence: Synthetic oligonucleotide"
uuaaacaacaaguaccuuu

SEQ ID NO: 263 - RNA, 19 nt, Artificial Sequence
  source: /note="Description of Artificial Sequence: Synthetic oligonucleotide"
ucagaaagucugugaagga

SEQ ID NO: 264 - RNA, 19 nt, Artificial Sequence
  source: /note="Description of Artificial Sequence: Synthetic oligonucleotide"
acugaagcauuugaugcaa

SEQ ID NO: 265 - RNA, 19 nt, Artificial Sequence
  source: /note="Description of Artificial Sequence: Synthetic oligonucleotide"
aguucuguguuaaaauguc

SEQ ID NO: 266 - RNA, 19 nt, Artificial Sequence
  source: /note="Description of Artificial Sequence: Synthetic oligonucleotide"
cacuauaauuacuugauuu

SEQ ID NO: 267 - RNA, 19 nt, Artificial Sequence
  source: /note="Description of Artificial Sequence: Synthetic oligonucleotide"
uaacucacuauaauuacuu

SEQ ID NO: 268 - RNA, 19 nt, Artificial Sequence
  source: /note="Description of Artificial Sequence: Synthetic oligonucleotide"
acaaaauaacucacuauaa

SEQ ID NO: 269 - RNA, 19 nt, Artificial Sequence
  source: /note="Description of Artificial Sequence: Synthetic oligonucleotide"
uccucuggaaauuggccuu

SEQ ID NO: 270 - RNA, 19 nt, Artificial Sequence
  source: /note="Description of Artificial Sequence: Synthetic oligonucleotide"
caaaauaacucacuauaau

SEQ ID NO: 271 - RNA, 19 nt, Artificial Sequence
  source: /note="Description of Artificial Sequence: Synthetic oligonucleotide"
cucuggaaauuggccuuca

SEQ ID NO: 272 - RNA, 19 nt, Artificial Sequence
  source: /note="Description of Artificial Sequence: Synthetic oligonucleotide"
gcaagauauuuuuauaaua

SEQ ID NO: 273 - RNA, 19 nt, Artificial Sequence
  source: /note="Description of Artificial Sequence: Synthetic oligonucleotide"
aauguuuuugucaaguaca

SEQ ID NO: 274 - RNA, 19 nt, Artificial Sequence
  source: /note="Description of Artificial Sequence: Synthetic oligonucleotide"
uuaaacaacaaguaccuuu

SEQ ID NO: 275 - RNA, 19 nt, Artificial Sequence
  source: /note="Description of Artificial Sequence: Synthetic oligonucleotide"
ucagaaagucugugaagga

SEQ ID NO: 276 - RNA, 19 nt, Artificial Sequence
  source: /note="Description of Artificial Sequence: Synthetic oligonucleotide"
acugaagcauuugaugcaa

SEQ ID NO: 277 - RNA, 19 nt, Artificial Sequence
  source: /note="Description of Artificial Sequence: Synthetic oligonucleotide"
aguucuguguuaaaauguc

SEQ ID NO: 278 - RNA, 19 nt, Artificial Sequence
  source: /note="Description of Artificial Sequence: Synthetic oligonucleotide"
cacuauaauuacuugauuu

SEQ ID NO: 279 - RNA, 19 nt, Artificial Sequence
  source: /note="Description of Artificial Sequence: Synthetic oligonucleotide"
uaacucacuauaauuacuu

SEQ ID NO: 280 - RNA, 19 nt, Artificial Sequence
  source: /note="Description of Artificial Sequence: Synthetic oligonucleotide"
acaaaauaacucacuauaa

SEQ ID NO: 281 - RNA, 19 nt, Artificial Sequence
  source: /note="Description of Artificial Sequence: Synthetic oligonucleotide"
uccucuggaaauuggccuu

SEQ ID NO: 282 - RNA, 19 nt, Artificial Sequence
  source: /note="Description of Artificial Sequence: Synthetic oligonucleotide"
caaaauaacucacuauaau

SEQ ID NO: 283 - RNA, 19 nt, Artificial Sequence
  source: /note="Description of Artificial Sequence: Synthetic oligonucleotide"
cucuggaaauuggccuuca

SEQ ID NO: 284 - RNA, 19 nt, Artificial Sequence
  source: /note="Description of Artificial Sequence: Synthetic oligonucleotide"
gcaagauauuuuuauaaua

SEQ ID NO: 285 - RNA, 19 nt, Artificial Sequence
  source: /note="Description of Artificial Sequence: Synthetic oligonucleotide"
aauguuuuugucaaguaca

SEQ ID NO: 286 - RNA, 19 nt, Artificial Sequence
  source: /note="Description of Artificial Sequence: Synthetic oligonucleotide"
uuaaacaacaaguaccuuu

SEQ ID NO: 287 - RNA, 19 nt, Artificial Sequence
  source: /note="Description of Artificial Sequence: Synthetic oligonucleotide"
ucagaaagucugugaagga

SEQ ID NO: 288 - RNA, 19 nt, Artificial Sequence
  source: /note="Description of Artificial Sequence: Synthetic oligonucleotide"
acugaagcauuugaugcaa

SEQ ID NO: 289 - RNA, 19 nt, Artificial Sequence
  source: /note="Description of Artificial Sequence: Synthetic oligonucleotide"
aguucuguguuaaaauguc

SEQ ID NO: 290 - RNA, 19 nt, Artificial Sequence
  source: /note="Description of Artificial Sequence: Synthetic oligonucleotide"
cacuauaauuacuugauuu

SEQ ID NO: 291 - RNA, 19 nt, Artificial Sequence
  source: /note="Description of Artificial Sequence: Synthetic oligonucleotide"
uaacucacuauaauuacuu

SEQ ID NO: 292 - RNA, 19 nt, Artificial Sequence
  source: /note="Description of Artificial Sequence: Synthetic oligonucleotide"
acaaaauaacucacuauaa

SEQ ID NO: 293 - RNA, 19 nt, Artificial Sequence
  source: /note="Description of Artificial Sequence: Synthetic oligonucleotide"
uccucuggaaauuggccuu

SEQ ID NO: 294 - RNA, 19 nt, Artificial Sequence
  source: /note="Description of Artificial Sequence: Synthetic oligonucleotide"
caaaauaacucacuauaau

SEQ ID NO: 295 - RNA, 19 nt, Artificial Sequence
  source: /note="Description of Artificial Sequence: Synthetic oligonucleotide"
cucuggaaauuggccuuca

SEQ ID NO: 296 - RNA, 19 nt, Artificial Sequence
  source: /note="Description of Artificial Sequence: Synthetic oligonucleotide"
gcaagauauuuuuauaaua

SEQ ID NO: 297 - RNA, 19 nt, Artificial Sequence
  source: /note="Description of Artificial Sequence: Synthetic oligonucleotide"
aauguuuuugucaaguaca

SEQ ID NO: 298 - RNA, 19 nt, Artificial Sequence
  source: /note="Description of Artificial Sequence: Synthetic oligonucleotide"
uuaaacaacaaguaccuuu

SEQ ID NO: 299 - RNA, 19 nt, Artificial Sequence
  source: /note="Description of Artificial Sequence: Synthetic oligonucleotide"
ucagaaagucugugaagga

SEQ ID NO: 300 - RNA, 19 nt, Artificial Sequence
  source: /note="Description of Artificial Sequence: Synthetic oligonucleotide"
acugaagcauuugaugcaa

SEQ ID NO: 301 - RNA, 19 nt, Artificial Sequence
  source: /note="Description of Artificial Sequence: Synthetic oligonucleotide"
aguucuguguuaaaauguc

SEQ ID NO: 302 - RNA, 19 nt, Artificial Sequence
  source: /note="Description of Artificial Sequence: Synthetic oligonucleotide"
aaaucaaguaauuauagug

SEQ ID NO: 303 - RNA, 19 nt, Artificial Sequence
  source: /note="Description of Artificial Sequence: Synthetic oligonucleotide"
aaguaauuauagugaguua

SEQ ID NO: 304 - RNA, 19 nt, Artificial Sequence
  source: /note="Description of Artificial Sequence: Synthetic oligonucleotide"
uuauagugaguuauuuugu

SEQ ID NO: 305 - RNA, 19 nt, Artificial Sequence
  source: /note="Description of Artificial Sequence: Synthetic oligonucleotide"
aaggccaauuuccagagga

SEQ ID NO: 306 - RNA, 19 nt, Artificial Sequence
  source: /note="Description of Artificial Sequence: Synthetic oligonucleotide"
auuauagugaguuauuuug

SEQ ID NO: 307 - RNA, 19 nt, Artificial Sequence
  source: /note="Description of Artificial Sequence: Synthetic oligonucleotide"
ugaaggccaauuuccagag

SEQ ID NO: 308 - RNA, 19 nt, Artificial Sequence
  source: /note="Description of Artificial Sequence: Synthetic oligonucleotide"
uauuauaaaaauaucuugc

SEQ ID NO: 309 - RNA, 19 nt, Artificial Sequence
  source: /note="Description of Artificial Sequence: Synthetic oligonucleotide"
uguacuugacaaaaacauu

SEQ ID NO: 310 - RNA, 19 nt, Artificial Sequence
  source: /note="Description of Artificial Sequence: Synthetic oligonucleotide"
aaagguacuuguuguuuaa

SEQ ID NO: 311 - RNA, 19 nt, Artificial Sequence
  source: /note="Description of Artificial Sequence: Synthetic oligonucleotide"
uccuucacagacuuucuga

SEQ ID NO: 312 - RNA, 19 nt, Artificial Sequence
  source: /note="Description of Artificial Sequence: Synthetic oligonucleotide"
uugcaucaaaugcuucagu

SEQ ID NO: 313 - RNA, 19 nt, Artificial Sequence
  source: /note="Description of Artificial Sequence: Synthetic oligonucleotide"
gacauuuuaacacagaacu

SEQ ID NO: 314 - RNA, 19 nt, Artificial Sequence
  source: /note="Description of Artificial Sequence: Synthetic oligonucleotide"
uccuuuuacacucaaaauc

SEQ ID NO: 315 - RNA, 19 nt, Artificial Sequence
  source: /note="Description of Artificial Sequence: Synthetic oligonucleotide"
uucuuuacaagguucauca

SEQ ID NO: 316 - RNA, 19 nt, Artificial Sequence
  source: /note="Description of Artificial Sequence: Synthetic oligonucleotide"
aaugaaaaauguuccaaug

SEQ ID NO: 317 - RNA, 19 nt, Artificial Sequence
  source: /note="Description of Artificial Sequence: Synthetic oligonucleotide"
aauaacuccgaauuucugg

SEQ ID NO: 318 - RNA, 19 nt, Artificial Sequence
  source: /note="Description of Artificial Sequence: Synthetic oligonucleotide"
gugaguuuuaucucccagg

SEQ ID NO: 319 - RNA, 19 nt, Artificial Sequence
  source: /note="Description of Artificial Sequence: Synthetic oligonucleotide"
uuuacaagguucaucauuu

SEQ ID NO: 320 - RNA, 19 nt, Artificial Sequence
  source: /note="Description of Artificial Sequence: Synthetic oligonucleotide"
aucaaaugugacuugagca

SEQ ID NO: 321 - RNA, 19 nt, Artificial Sequence
  source: /note="Description of Artificial Sequence: Synthetic oligonucleotide"
uuuauaagcauaugcaauc

SEQ ID NO: 322 - RNA, 19 nt, Artificial Sequence
  source: /note="Description of Artificial Sequence: Synthetic oligonucleotide"
uaaauuuuuuaucaggaua

SEQ ID NO: 323 - RNA, 19 nt, Artificial Sequence
  source: /note="Description of Artificial Sequence: Synthetic oligonucleotide"
aauaaaagcugcaaacuuc

SEQ ID NO: 324 - RNA, 19 nt, Artificial Sequence
  source: /note="Description of Artificial Sequence: Synthetic oligonucleotide"
uccaauaugaucaauuucu

SEQ ID NO: 325 - RNA, 19 nt, Artificial Sequence
  source: /note="Description of Artificial Sequence: Synthetic oligonucleotide"
aacuaaauuuuuuaucagg

SEQ ID NO: 326 - RNA, 19 nt, Artificial Sequence
  source: /note="Description of Artificial Sequence: Synthetic oligonucleotide"
uuuacuaagauuucuuuuc

SEQ ID NO: 327 - RNA, 19 nt, Artificial Sequence
  source: /note="Description of Artificial Sequence: Synthetic oligonucleotide"
aauguuuauacuuugauaa

SEQ ID NO: 328 - RNA, 19 nt, Artificial Sequence
  source: /note="Description of Artificial Sequence: Synthetic oligonucleotide"
accaaauucaguuuguagg

SEQ ID NO: 329 - RNA, 19 nt, Artificial Sequence
  source: /note="Description of Artificial Sequence: Synthetic oligonucleotide"
aaugacauauguuugcucc

SEQ ID NO: 330 - RNA, 19 nt, Artificial Sequence
  source: /note="Description of Artificial Sequence: Synthetic oligonucleotide"
ugaacuacaguuguuacau

SEQ ID NO: 331 - RNA, 19 nt, Artificial Sequence
  source: /note="Description of Artificial Sequence: Synthetic oligonucleotide"
aaauguuccaaugauuucc

SEQ ID NO: 332 - RNA, 19 nt, Artificial Sequence
  source: /note="Description of Artificial Sequence: Synthetic oligonucleotide"
aguaauuucaaaauucuua

SEQ ID NO: 333 - RNA, 19 nt, Artificial Sequence
  source: /note="Description of Artificial Sequence: Synthetic oligonucleotide"
aucgaauucaguugcagaa

SEQ ID NO: 334 - RNA, 19 nt, Artificial Sequence
  source: /note="Description of Artificial Sequence: Synthetic oligonucleotide"
ugaaauacucuuuccaagg

SEQ ID NO: 335 - RNA, 19 nt, Artificial Sequence
  source: /note="Description of Artificial Sequence: Synthetic oligonucleotide"
guaacuaaauuuuuuauca

SEQ ID NO: 336 - RNA, 19 nt, Artificial Sequence
  source: /note="Description of Artificial Sequence: Synthetic oligonucleotide"
uugaaauacucuuuccaag

SEQ ID NO: 337 - RNA, 19 nt, Artificial Sequence
  source: /note="Description of Artificial Sequence: Synthetic oligonucleotide"
aaaucaaguaauuauagug

SEQ ID NO: 338 - RNA, 19 nt, Artificial Sequence
  source: /note="Description of Artificial Sequence: Synthetic oligonucleotide"
aaguaauuauagugaguua

SEQ ID NO: 339 - RNA, 19 nt, Artificial Sequence
  source: /note="Description of Artificial Sequence: Synthetic oligonucleotide"
uuauagugaguuauuuugu

SEQ ID NO: 340 - RNA, 19 nt, Artificial Sequence
  source: /note="Description of Artificial Sequence: Synthetic oligonucleotide"
aaggccaauuuccagagga

SEQ ID NO: 341 - RNA, 19 nt, Artificial Sequence
  source: /note="Description of Artificial Sequence: Synthetic oligonucleotide"
auuauagugaguuauuuug

SEQ ID NO: 342 - RNA, 19 nt, Artificial Sequence
  source: /note="Description of Artificial Sequence: Synthetic oligonucleotide"
ugaaggccaauuuccagag

SEQ ID NO: 343 - RNA, 19 nt, Artificial Sequence
  source: /note="Description of Artificial Sequence: Synthetic oligonucleotide"
uauuauaaaaauaucuugc

SEQ ID NO: 344 - RNA, 19 nt, Artificial Sequence
  source: /note="Description of Artificial Sequence: Synthetic oligonucleotide"
uguacuugacaaaaacauu

SEQ ID NO: 345 - RNA, 19 nt, Artificial Sequence
  source: /note="Description of Artificial Sequence: Synthetic oligonucleotide"
aaagguacuuguuguuuaa

SEQ ID NO: 346 - RNA, 19 nt, Artificial Sequence
  source: /note="Description of Artificial Sequence: Synthetic oligonucleotide"
uccuucacagacuuucuga

SEQ ID NO: 347 - RNA, 19 nt, Artificial Sequence
  source: /note="Description of Artificial Sequence: Synthetic oligonucleotide"
uugcaucaaaugcuucagu

SEQ ID NO: 348 - RNA, 19 nt, Artificial Sequence
  source: /note="Description of Artificial Sequence: Synthetic oligonucleotide"
gacauuuuaacacagaacu

SEQ ID NO: 349 - RNA, 19 nt, Artificial Sequence
  source: /note="Description of Artificial Sequence: Synthetic oligonucleotide"
aaaucaaguaauuauagug

SEQ ID NO: 350 - RNA, 19 nt, Artificial Sequence
  source: /note="Description of Artificial Sequence: Synthetic oligonucleotide"
aaguaauuauagugaguua

SEQ ID NO: 351 - RNA, 19 nt, Artificial Sequence
  source: /note="Description of Artificial Sequence: Synthetic oligonucleotide"
uuauagugaguuauuuugu

SEQ ID NO: 352 - RNA, 19 nt, Artificial Sequence
  source: /note="Description of Artificial Sequence: Synthetic oligonucleotide"
aaggccaauuuccagagga

SEQ ID NO: 353 - RNA, 19 nt, Artificial Sequence
  source: /note="Description of Artificial Sequence: Synthetic oligonucleotide"
auuauagugaguuauuuug

SEQ ID NO: 354 - RNA, 19 nt, Artificial Sequence
  source: /note="Description of Artificial Sequence: Synthetic oligonucleotide"
ugaaggccaauuuccagag

SEQ ID NO: 355 - RNA, 19 nt, Artificial Sequence
  source: /note="Description of Artificial Sequence: Synthetic oligonucleotide"
uauuauaaaaauaucuugc

SEQ ID NO: 356 - RNA, 19 nt, Artificial Sequence
  source: /note="Description of Artificial Sequence: Synthetic oligonucleotide"
uguacuugacaaaaacauu

SEQ ID NO: 357 - RNA, 19 nt, Artificial Sequence
  source: /note="Description of Artificial Sequence: Synthetic oligonucleotide"
aaagguacuuguuguuuaa

SEQ ID NO: 358 - RNA, 19 nt, Artificial Sequence
  source: /note="Description of Artificial Sequence: Synthetic oligonucleotide"
uccuucacagacuuucuga

SEQ ID NO: 359 - RNA, 19 nt, Artificial Sequence
  source: /note="Description of Artificial Sequence: Synthetic oligonucleotide"
uugcaucaaaugcuucagu

SEQ ID NO: 360 - RNA, 19 nt, Artificial Sequence
  source: /note="Description of Artificial Sequence: Synthetic oligonucleotide"
gacauuuuaacacagaacu

SEQ ID NO: 361 - RNA, 19 nt, Artificial Sequence
  source: /note="Description of Artificial Sequence: Synthetic oligonucleotide"
aaaucaaguaauuauagug

SEQ ID NO: 362 - RNA, 19 nt, Artificial Sequence
  source: /note="Description of Artificial Sequence: Synthetic oligonucleotide"
aaguaauuauagugaguua

SEQ ID NO: 363 - RNA, 19 nt, Artificial Sequence
  source: /note="Description of Artificial Sequence: Synthetic oligonucleotide"
uuauagugaguuauuuugu

SEQ ID NO: 364 - RNA, 19 nt, Artificial Sequence
  source: /note="Description of Artificial Sequence: Synthetic oligonucleotide"
aaggccaauuuccagagga

SEQ ID NO: 365 - RNA, 19 nt, Artificial Sequence
  source: /note="Description of Artificial Sequence: Synthetic oligonucleotide"
auuauagugaguuauuuug

SEQ ID NO: 366 - RNA, 19 nt, Artificial Sequence
  source: /note="Description of Artificial Sequence: Synthetic oligonucleotide"
ugaaggccaauuuccagag

SEQ ID NO: 367 - RNA, 19 nt, Artificial Sequence
  source: /note="Description of Artificial Sequence: Synthetic oligonucleotide"
uauuauaaaaauaucuugc

SEQ ID NO: 368 - RNA, 19 nt, Artificial Sequence
  source: /note="Description of Artificial Sequence: Synthetic oligonucleotide"
uguacuugacaaaaacauu

SEQ ID NO: 369 - RNA, 19 nt, Artificial Sequence
  source: /note="Description of Artificial Sequence: Synthetic oligonucleotide"
aaagguacuuguuguuuaa

SEQ ID NO: 370 - RNA, 19 nt, Artificial Sequence
  source: /note="Description of Artificial Sequence: Synthetic oligonucleotide"
uccuucacagacuuucuga

SEQ ID NO: 371 - RNA, 19 nt, Artificial Sequence
  source: /note="Description of Artificial Sequence: Synthetic oligonucleotide"
uugcaucaaaugcuucagu

SEQ ID NO: 372 - RNA, 19 nt, Artificial Sequence
  source: /note="Description of Artificial Sequence: Synthetic oligonucleotide"
gacauuuuaacacagaacu

SEQ ID NO: 373 - RNA, 19 nt, Artificial Sequence
  source: /note="Description of Artificial Sequence: Synthetic oligonucleotide"
aaaucaaguaauuauagug

SEQ ID NO: 374 - RNA, 19 nt, Artificial Sequence
  source: /note="Description of Artificial Sequence: Synthetic oligonucleotide"
aaguaauuauagugaguua

SEQ ID NO: 375 - RNA, 19 nt, Artificial Sequence
  source: /note="Description of Artificial Sequence: Synthetic oligonucleotide"
uuauagugaguuauuuugu

SEQ ID NO: 376 - RNA, 19 nt, Artificial Sequence
  source: /note="Description of Artificial Sequence: Synthetic oligonucleotide"
aaggccaauuuccagagga

SEQ ID NO: 377 - RNA, 19 nt, Artificial Sequence
  source: /note="Description of Artificial Sequence: Synthetic oligonucleotide"
auuauagugaguuauuuug

SEQ ID NO: 378 - RNA, 19 nt, Artificial Sequence
  source: /note="Description of Artificial Sequence: Synthetic oligonucleotide"
ugaaggccaauuuccagag

SEQ ID NO: 379 - RNA, 19 nt, Artificial Sequence
  source: /note="Description of Artificial Sequence: Synthetic oligonucleotide"
uauuauaaaaauaucuugc

SEQ ID NO: 380 - RNA, 19 nt, Artificial Sequence
  source: /note="Description of Artificial Sequence: Synthetic oligonucleotide"
uguacuugacaaaaacauu

SEQ ID NO: 381 - RNA, 19 nt, Artificial Sequence
  source: /note="Description of Artificial Sequence: Synthetic oligonucleotide"
aaagguacuuguuguuuaa

SEQ ID NO: 382 - RNA, 19 nt, Artificial Sequence
  source: /note="Description of Artificial Sequence: Synthetic oligonucleotide"
uccuucacagacuuucuga

SEQ ID NO: 383 - RNA, 19 nt, Artificial Sequence
  source: /note="Description of Artificial Sequence: Synthetic oligonucleotide"
uugcaucaaaugcuucagu

SEQ ID NO: 384 - RNA, 19 nt, Artificial Sequence
  source: /note="Description of Artificial Sequence: Synthetic oligonucleotide"
gacauuuuaacacagaacu

SEQ ID NO: 385 - DNA, 21 bp, Artificial Sequence
  source: /note="Description of Artificial Sequence: Synthetic oligonucleotide"
  source: /note="Description of Combined DNA/RNA Molecule: Synthetic oligonucleotide"
cacuauaauuacuugauuutt

SEQ ID NO: 386 - DNA, 21 bp, Artificial Sequence
  source: /note="Description of Artificial Sequence: Synthetic oligonucleotide"
  source: /note="Description of Combined DNA/RNA Molecule: Synthetic oligonucleotide"
uaacucacuauaauuacuutt

SEQ ID NO: 387 - DNA, 21 bp, Artificial Sequence
  source: /note="Description of Artificial Sequence: Synthetic oligonucleotide"
  source: /note="Description of Combined DNA/RNA Molecule: Synthetic oligonucleotide"
acaaaauaacucacuauaatt

SEQ ID NO: 388 - DNA, 21 bp, Artificial Sequence
  source: /note="Description of Artificial Sequence: Synthetic oligonucleotide"
  source: /note="Description of Combined DNA/RNA Molecule: Synthetic oligonucleotide"
uccucuggaaauuggccuutt

SEQ ID NO: 389 - DNA, 21 bp, Artificial Sequence
  source: /note="Description of Artificial Sequence: Synthetic oligonucleotide"
  source: /note="Description of Combined DNA/RNA Molecule: Synthetic oligonucleotide"
caaaauaacucacuauaautt

SEQ ID NO: 390 - DNA, 21 bp, Artificial Sequence
  source: /note="Description of Artificial Sequence: Synthetic oligonucleotide"
  source: /note="Description of Combined DNA/RNA Molecule: Synthetic oligonucleotide"
cucuggaaauuggccuucatt

SEQ ID NO: 391 - DNA, 21 bp, Artificial Sequence
  source: /note="Description of Artificial Sequence: Synthetic oligonucleotide"
  source: /note="Description of Combined DNA/RNA Molecule: Synthetic oligonucleotide"
gcaagauauuuuuauaauatt

SEQ ID NO: 392 - DNA, 21 bp, Artificial Sequence
  source: /note="Description of Artificial Sequence: Synthetic oligonucleotide"
  source: /note="Description of Combined DNA/RNA Molecule: Synthetic oligonucleotide"
aauguuuuugucaaguacatt

SEQ ID NO: 393 - DNA, 21 bp, Artificial Sequence
  source: /note="Description of Artificial Sequence: Synthetic oligonucleotide"
  source: /note="Description of Combined DNA/RNA Molecule: Synthetic oligonucleotide"
uuaaacaacaaguaccuuutt

SEQ ID NO: 394 - DNA, 21 bp, Artificial Sequence
  source: /note="Description of Artificial Sequence: Synthetic oligonucleotide"
  source: /note="Description of Combined DNA/RNA Molecule: Synthetic oligonucleotide"
ucagaaagucugugaaggatt

SEQ ID NO: 395 - DNA, 21 bp, Artificial Sequence
  source: /note="Description of Artificial Sequence: Synthetic oligonucleotide"
  source: /note="Description of Combined DNA/RNA Molecule: Synthetic oligonucleotide"
acugaagcauuugaugcaatt

SEQ ID NO: 396 - DNA, 21 bp, Artificial Sequence
  source: /note="Description of Artificial Sequence: Synthetic oligonucleotide"
  source: /note="Description of Combined DNA/RNA Molecule: Synthetic oligonucleotide"
aguucuguguuaaaauguctt

SEQ ID NO: 397 - DNA, 21 bp, Artificial Sequence
  source: /note="Description of Artificial Sequence: Synthetic oligonucleotide"
  source: /note="Description of Combined DNA/RNA Molecule: Synthetic oligonucleotide"
gauuuugaguguaaaaggatt

SEQ ID NO: 398 - DNA, 21 bp, Artificial Sequence
  source: /note="Description of Artificial Sequence: Synthetic oligonucleotide"
  source: /note="Description of Combined DNA/RNA Molecule: Synthetic oligonucleotide"
ugaugaaccuuguaaagaatt

SEQ ID NO: 399 - DNA, 21 bp, Artificial Sequence
  source: /note="Description of Artificial Sequence: Synthetic oligonucleotide"
  source: /note="Description of Combined DNA/RNA Molecule: Synthetic oligonucleotide"
cauuggaacauuuuucauutt

SEQ ID NO: 400 - DNA, 21 bp, Artificial Sequence
  source: /note="Description of Artificial Sequence: Synthetic oligonucleotide"
  source: /note="Description of Combined DNA/RNA Molecule: Synthetic oligonucleotide"
ccagaaauucggaguuauutt

SEQ ID NO: 401 - DNA, 21 bp, Artificial Sequence
  source: /note="Description of Artificial Sequence: Synthetic oligonucleotide"
  source: /note="Description of Combined DNA/RNA Molecule: Synthetic oligonucleotide"
ccugggagauaaaacucactt

SEQ ID NO: 402 - DNA, 21 bp, Artificial Sequence
  source: /note="Description of Artificial Sequence: Synthetic oligonucleotide"
  source: /note="Description of Combined DNA/RNA Molecule: Synthetic oligonucleotide"
aaaugaugaaccuuguaaatt

SEQ ID NO: 403 - DNA, 21 bp, Artificial Sequence
  source: /note="Description of Artificial Sequence: Synthetic oligonucleotide"
  source: /note="Description of Combined DNA/RNA Molecule: Synthetic oligonucleotide"
ugcucaagucacauuugautt

SEQ ID NO: 404 - DNA, 21 bp, Artificial Sequence
  source: /note="Description of Artificial Sequence: Synthetic oligonucleotide"
  source: /note="Description of Combined DNA/RNA Molecule: Synthetic oligonucleotide"
gauugcauaugcuuauaaatt

SEQ ID NO: 405 - DNA, 21 bp, Artificial Sequence
  source: /note="Description of Artificial Sequence: Synthetic oligonucleotide"
  source: /note="Description of Combined DNA/RNA Molecule: Synthetic oligonucleotide"
uauccugauaaaaaauuuatt

SEQ ID NO: 406 - DNA, 21 bp, Artificial Sequence
  source: /note="Description of Artificial Sequence: Synthetic oligonucleotide"
  source: /note="Description of Combined DNA/RNA Molecule: Synthetic oligonucleotide"
gaaguuugcagcuuuuauutt

SEQ ID NO: 407 - DNA, 21 bp, Artificial Sequence
  source: /note="Description of Artificial Sequence: Synthetic oligonucleotide"
  source: /note="Description of Combined DNA/RNA Molecule: Synthetic oligonucleotide"
agaaauugaucauauuggatt

SEQ ID NO: 408 - DNA, 21 bp, Artificial Sequence
  source: /note="Description of Artificial Sequence: Synthetic oligonucleotide"
  source: /note="Description of Combined DNA/RNA Molecule: Synthetic oligonucleotide"
ccugauaaaaaauuuaguutt

SEQ ID NO: 409 - DNA, 21 bp, Artificial Sequence
  source: /note="Description of Artificial Sequence: Synthetic oligonucleotide"
  source: /note="Description of Combined DNA/RNA Molecule: Synthetic oligonucleotide"
gaaaagaaaucuuaguaaatt

SEQ ID NO: 410 - DNA, 21 bp, Artificial Sequence
  source: /note="Description of Artificial Sequence: Synthetic oligonucleotide"
  source: /note="Description of Combined DNA/RNA Molecule: Synthetic oligonucleotide"
uuaucaaaguauaaacauutt

SEQ ID NO: 411 - DNA, 21 bp, Artificial Sequence
  source: /note="Description of Artificial Sequence: Synthetic oligonucleotide"
  source: /note="Description of Combined DNA/RNA Molecule: Synthetic oligonucleotide"
ccuacaaacugaauuuggutt

SEQ ID NO: 412 - DNA, 21 bp, Artificial Sequence
  source: /note="Description of Artificial Sequence: Synthetic oligonucleotide"
  source: /note="Description of Combined DNA/RNA Molecule: Synthetic oligonucleotide"
ggagcaaacauaugucauutt

SEQ ID NO: 413 - DNA, 21 bp, Artificial Sequence
  source: /note="Description of Artificial Sequence: Synthetic oligonucleotide"
  source: /note="Description of Combined DNA/RNA Molecule: Synthetic oligonucleotide"
auguaacaacuguaguucatt

SEQ ID NO: 414 - DNA, 21 bp, Artificial Sequence
  source: /note="Description of Artificial Sequence: Synthetic oligonucleotide"
  source: /note="Description of Combined DNA/RNA Molecule: Synthetic oligonucleotide"
ggaaaucauuggaacauuutt

SEQ ID NO: 415 - DNA, 21 bp, Artificial Sequence
  source: /note="Description of Artificial Sequence: Synthetic oligonucleotide"
  source: /note="Description of Combined DNA/RNA Molecule: Synthetic oligonucleotide"
uaagaauuuugaaauuacutt

SEQ ID NO: 416 - DNA, 21 bp, Artificial Sequence
  source: /note="Description of Artificial Sequence: Synthetic oligonucleotide"
  source: /note="Description of Combined DNA/RNA Molecule: Synthetic oligonucleotide"
uucugcaacugaauucgautt

SEQ ID NO: 417 - DNA, 21 bp, Artificial Sequence
  source: /note="Description of Artificial Sequence: Synthetic oligonucleotide"
  source: /note="Description of Combined DNA/RNA Molecule: Synthetic oligonucleotide"
ccuuggaaagaguauuucatt

SEQ ID NO: 418 - DNA, 21 bp, Artificial Sequence
  source: /note="Description of Artificial Sequence: Synthetic oligonucleotide"
  source: /note="Description of Combined DNA/RNA Molecule: Synthetic oligonucleotide"
ugauaaaaaauuuaguuactt

SEQ ID NO: 419 - DNA, 21 bp, Artificial Sequence
  source: /note="Description of Artificial Sequence: Synthetic oligonucleotide"
  source: /note="Description of Combined DNA/RNA Molecule: Synthetic oligonucleotide"
cuuggaaagaguauuucaatt

SEQ ID NO: 420 - DNA, 21 bp, Artificial Sequence
  source: /note="Description of Artificial Sequence: Synthetic oligonucleotide"
  source: /note="Description of Combined DNA/RNA Molecule: Synthetic oligonucleotide"
cacuauaauuacuugauuutt

SEQ ID NO: 421 - DNA, 21 bp, Artificial Sequence
  source: /note="Description of Artificial Sequence: Synthetic oligonucleotide"
  source: /note="Description of Combined DNA/RNA Molecule: Synthetic oligonucleotide"
uaacucacuauaauuacuutt

SEQ ID NO: 422 - DNA, 21 bp, Artificial Sequence
  source: /note="Description of Artificial Sequence: Synthetic oligonucleotide"
  source: /note="Description of Combined DNA/RNA Molecule: Synthetic oligonucleotide"
acaaaauaacucacuauaatt

SEQ ID NO: 423 - DNA, 21 bp, Artificial Sequence
  source: /note="Description of Artificial Sequence: Synthetic oligonucleotide"
  source: /note="Description of Combined DNA/RNA Molecule: Synthetic oligonucleotide"
uccucuggaaauuggccuutt

SEQ ID NO: 424 - DNA, 21 bp, Artificial Sequence
  source: /note="Description of Artificial Sequence: Synthetic oligonucleotide"
  source: /note="Description of Combined DNA/RNA Molecule: Synthetic oligonucleotide"
caaaauaacucacuauaautt

SEQ ID NO: 425 - DNA, 21 bp, Artificial Sequence
  source: /note="Description of Artificial Sequence: Synthetic oligonucleotide"
  source: /note="Description of Combined DNA/RNA Molecule: Synthetic oligonucleotide"
cucuggaaauuggccuucatt

SEQ ID NO: 426 - DNA, 21 bp, Artificial Sequence
  source: /note="Description of Artificial Sequence: Synthetic oligonucleotide"
  source: /note="Description of Combined DNA/RNA Molecule: Synthetic oligonucleotide"
gcaagauauuuuuauaauatt

SEQ ID NO: 427 - DNA, 21 bp, Artificial Sequence
  source: /note="Description of Artificial Sequence: Synthetic oligonucleotide"
  source: /note="Description of Combined DNA/RNA Molecule: Synthetic oligonucleotide"
aauguuuuugucaaguacatt

SEQ ID NO: 428 - DNA, 21 bp, Artificial Sequence
  source: /note="Description of Artificial Sequence: Synthetic oligonucleotide"
  source: /note="Description of Combined DNA/RNA Molecule: Synthetic oligonucleotide"
uuaaacaacaaguaccuuutt

SEQ ID NO: 429 - DNA, 21 bp, Artificial Sequence
  source: /note="Description of Artificial Sequence: Synthetic oligonucleotide"
  source: /note="Description of Combined DNA/RNA Molecule: Synthetic oligonucleotide"
ucagaaagucugugaaggatt

SEQ ID NO: 430 - DNA, 21 bp, Artificial Sequence
  source: /note="Description of Artificial Sequence: Synthetic oligonucleotide"
  source: /note="Description of Combined DNA/RNA Molecule: Synthetic oligonucleotide"
acugaagcauuugaugcaatt

SEQ ID NO: 431 - DNA, 21 bp, Artificial Sequence
  source: /note="Description of Artificial Sequence: Synthetic oligonucleotide"
  source: /note="Description of Combined DNA/RNA Molecule: Synthetic oligonucleotide"
aguucuguguuaaaauguctt

SEQ ID NO: 432 - DNA, 21 bp, Artificial Sequence
  source: /note="Description of Artificial Sequence: Synthetic oligonucleotide"
  source: /note="Description of Combined DNA/RNA Molecule: Synthetic oligonucleotide"
cacuauaauuacuugauuutt

SEQ ID NO: 433 - DNA, 21 bp, Artificial Sequence
  source: /note="Description of Artificial Sequence: Synthetic oligonucleotide"
  source: /note="Description of Combined DNA/RNA Molecule: Synthetic oligonucleotide"
uaacucacuauaauuacuutt

SEQ ID NO: 434 - DNA, 21 bp, Artificial Sequence
  source: /note="Description of Artificial Sequence: Synthetic oligonucleotide"
  source: /note="Description of Combined DNA/RNA Molecule: Synthetic oligonucleotide"
acaaaauaacucacuauaatt

SEQ ID NO: 435 - DNA, 21 bp, Artificial Sequence
  source: /note="Description of Artificial Sequence: Synthetic oligonucleotide"
  source: /note="Description of Combined DNA/RNA Molecule: Synthetic oligonucleotide"
uccucuggaaauuggccuutt

SEQ ID NO: 436 - DNA, 21 bp, Artificial Sequence
  source: /note="Description of Artificial Sequence: Synthetic oligonucleotide"
  source: /note="Description of Combined DNA/RNA Molecule: Synthetic oligonucleotide"
caaaauaacucacuauaautt

SEQ ID NO: 437 - DNA, 21 bp, Artificial Sequence
  source: /note="Description of Artificial Sequence: Synthetic oligonucleotide"
  source: /note="Description of Combined DNA/RNA Molecule: Synthetic oligonucleotide"
cucuggaaauuggccuucatt

SEQ ID NO: 438 - DNA, 21 bp, Artificial Sequence
  source: /note="Description of Artificial Sequence: Synthetic oligonucleotide"
  source: /note="Description of Combined DNA/RNA Molecule: Synthetic oligonucleotide"
gcaagauauuuuuauaauatt

SEQ ID NO: 439 - DNA, 21 bp, Artificial Sequence
  source: /note="Description of Artificial Sequence: Synthetic oligonucleotide"
  source: /note="Description of Combined DNA/RNA Molecule: Synthetic oligonucleotide"
aauguuuuugucaaguacatt

SEQ ID NO: 440 - DNA, 21 bp, Artificial Sequence
  source: /note="Description of Artificial Sequence: Synthetic oligonucleotide"
  source: /note="Description of Combined DNA/RNA Molecule: Synthetic oligonucleotide"
uuaaacaacaaguaccuuutt

SEQ ID NO: 441 - DNA, 21 bp, Artificial Sequence
  source: /note="Description of Artificial Sequence: Synthetic oligonucleotide"
  source: /note="Description of Combined DNA/RNA Molecule: Synthetic oligonucleotide"
ucagaaagucugugaaggatt

SEQ ID NO: 442 - DNA, 21 bp, Artificial Sequence
  source: /note="Description of Artificial Sequence: Synthetic oligonucleotide"
  source: /note="Description of Combined DNA/RNA Molecule: Synthetic oligonucleotide"
acugaagcauuugaugcaatt

SEQ ID NO: 443 - DNA, 21 bp, Artificial Sequence
  source: /note="Description of Artificial Sequence: Synthetic oligonucleotide"
  source: /note="Description of Combined DNA/RNA Molecule: Synthetic oligonucleotide"
aguucuguguuaaaauguctt

SEQ ID NO: 444 - DNA, 21 bp, Artificial Sequence
  source: /note="Description of Artificial Sequence: Synthetic oligonucleotide"
  source: /note="Description of Combined DNA/RNA Molecule: Synthetic oligonucleotide"
cacuauaauuacuugauuutt

SEQ ID NO: 445 - DNA, 21 bp, Artificial Sequence
  source: /note="Description of Artificial Sequence: Synthetic oligonucleotide"
  source: /note="Description of Combined DNA/RNA Molecule: Synthetic oligonucleotide"
uaacucacuauaauuacuutt

SEQ ID NO: 446 - DNA, 21 bp, Artificial Sequence
  source: /note="Description of Artificial Sequence: Synthetic oligonucleotide"
  source: /note="Description of Combined DNA/RNA Molecule: Synthetic oligonucleotide"
acaaaauaacucacuauaatt

SEQ ID NO: 447 - DNA, 21 bp, Artificial Sequence
  source: /note="Description of Artificial Sequence: Synthetic oligonucleotide"
  source: /note="Description of Combined DNA/RNA Molecule: Synthetic oligonucleotide"
uccucuggaaauuggccuutt

SEQ ID NO: 448 - DNA, 21 bp, Artificial Sequence
  source: /note="Description of Artificial Sequence: Synthetic oligonucleotide"
  source: /note="Description of Combined DNA/RNA Molecule: Synthetic oligonucleotide"
caaaauaacucacuauaautt

SEQ ID NO: 449 - DNA, 21 bp, Artificial Sequence
  source: /note="Description of Artificial Sequence: Synthetic oligonucleotide"
  source: /note="Description of Combined DNA/RNA Molecule: Synthetic oligonucleotide"
cucuggaaauuggccuucatt

SEQ ID NO: 450 - DNA, 21 bp, Artificial Sequence
  source: /note="Description of Artificial Sequence: Synthetic oligonucleotide"
  source: /note="Description of Combined DNA/RNA Molecule: Synthetic oligonucleotide"
gcaagauauuuuuauaauatt

SEQ ID NO: 451 - DNA, 21 bp, Artificial Sequence
  source: /note="Description of Artificial Sequence: Synthetic oligonucleotide"
  source: /note="Description of Combined DNA/RNA Molecule: Synthetic oligonucleotide"
aauguuuuugucaaguacatt

SEQ ID NO: 452 - DNA, 21 bp, Artificial Sequence
  source: /note="Description of Artificial Sequence: Synthetic oligonucleotide"
  source: /note="Description of Combined DNA/RNA Molecule: Synthetic oligonucleotide"
uuaaacaacaaguaccuuutt

SEQ ID NO: 453 - DNA, 21 bp, Artificial Sequence
  source: /note="Description of Artificial Sequence: Synthetic oligonucleotide"
  source: /note="Description of Combined DNA/RNA Molecule: Synthetic oligonucleotide"
ucagaaagucugugaaggatt

SEQ ID NO: 454 - DNA, 21 bp, Artificial Sequence
  source: /note="Description of Artificial Sequence: Synthetic oligonucleotide"
  source: /note="Description of Combined DNA/RNA Molecule: Synthetic oligonucleotide"
acugaagcauuugaugcaatt

SEQ ID NO: 455 - DNA, 21 bp, Artificial Sequence
  source: /note="Description of Artificial Sequence: Synthetic oligonucleotide"
  source: /note="Description of Combined DNA/RNA Molecule: Synthetic oligonucleotide"
aguucuguguuaaaauguctt

SEQ ID NO: 456 - DNA, 21 bp, Artificial Sequence
  source: /note="Description of Artificial Sequence: Synthetic oligonucleotide"
  source: /note="Description of Combined DNA/RNA Molecule: Synthetic oligonucleotide"
cacuauaauuacuugauuutt

SEQ ID NO: 457 - DNA, 21 bp, Artificial Sequence
  source: /note="Description of Artificial Sequence: Synthetic oligonucleotide"
  source: /note="Description of Combined DNA/RNA Molecule: Synthetic oligonucleotide"
uaacucacuauaauuacuutt

SEQ ID NO: 458 - DNA, 21 bp, Artificial Sequence
  source: /note="Description of Artificial Sequence: Synthetic oligonucleotide"
  source: /note="Description of Combined DNA/RNA Molecule: Synthetic oligonucleotide"
acaaaauaacucacuauaatt

SEQ ID NO: 459 - DNA, 21 bp, Artificial Sequence
  source: /note="Description of Artificial Sequence: Synthetic oligonucleotide"
  source: /note="Description of Combined DNA/RNA Molecule: Synthetic oligonucleotide"
uccucuggaaauuggccuutt

SEQ ID NO: 460 - DNA, 21 bp, Artificial Sequence
  source: /note="Description of Artificial Sequence: Synthetic oligonucleotide"
  source: /note="Description of Combined DNA/RNA Molecule: Synthetic oligonucleotide"
caaaauaacucacuauaautt

SEQ ID NO: 461 - DNA, 21 bp, Artificial Sequence
  source: /note="Description of Artificial Sequence: Synthetic oligonucleotide"
  source: /note="Description of Combined DNA/RNA Molecule: Synthetic oligonucleotide"
cucuggaaauuggccuucatt

SEQ ID NO: 462 - DNA, 21 bp, Artificial Sequence
  source: /note="Description of Artificial Sequence: Synthetic oligonucleotide"
  source: /note="Description of Combined DNA/RNA Molecule: Synthetic oligonucleotide"
gcaagauauuuuuauaauatt

SEQ ID NO: 463 - DNA, 21 bp, Artificial Sequence
  source: /note="Description of Artificial Sequence: Synthetic oligonucleotide"
  source: /note="Description of Combined DNA/RNA Molecule: Synthetic oligonucleotide"
aauguuuuugucaaguacatt

SEQ ID NO: 464 - DNA, 21 bp, Artificial Sequence
  source: /note="Description of Artificial Sequence: Synthetic oligonucleotide"
  source: /note="Description of Combined DNA/RNA Molecule: Synthetic oligonucleotide"
uuaaacaacaaguaccuuutt

SEQ ID NO: 465 - DNA, 21 bp, Artificial Sequence
  source: /note="Description of Artificial Sequence: Synthetic oligonucleotide"
  source: /note="Description of Combined DNA/RNA Molecule: Synthetic oligonucleotide"
ucagaaagucugugaaggatt

SEQ ID NO: 466 - DNA, 21 bp, Artificial Sequence
  source: /note="Description of Artificial Sequence: Synthetic oligonucleotide"
  source: /note="Description of Combined DNA/RNA Molecule: Synthetic oligonucleotide"
acugaagcauuugaugcaatt

SEQ ID NO: 467 - DNA, 21 bp, Artificial Sequence
  source: /note="Description of Artificial Sequence: Synthetic oligonucleotide"
  source: /note="Description of Combined DNA/RNA Molecule: Synthetic oligonucleotide"
aguucuguguuaaaauguctt

SEQ ID NO: 468 - DNA, 21 bp, Artificial Sequence
  source: /note="Description of Artificial Sequence: Synthetic oligonucleotide"
  source: /note="Description of Combined DNA/RNA Molecule: Synthetic oligonucleotide"
aaaucaaguaauuauagugtt

SEQ ID NO: 469 - DNA, 21 bp, Artificial Sequence
  source: /note="Description of Artificial Sequence: Synthetic oligonucleotide"
  source: /note="Description of Combined DNA/RNA Molecule: Synthetic oligonucleotide"
aaguaauuauagugaguuatt

SEQ ID NO: 470 - DNA, 21 bp, Artificial Sequence
  source: /note="Description of Artificial Sequence: Synthetic oligonucleotide"
  source: /note="Description of Combined DNA/RNA Molecule: Synthetic oligonucleotide"
uuauagugaguuauuuugutt

SEQ ID NO: 471 - DNA, 21 bp, Artificial Sequence
  source: /note="Description of Artificial Sequence: Synthetic oligonucleotide"
  source: /note="Description of Combined DNA/RNA Molecule: Synthetic oligonucleotide"
aaggccaauuuccagaggatt

SEQ ID NO: 472 - DNA, 21 bp, Artificial Sequence
  source: /note="Description of Artificial Sequence: Synthetic oligonucleotide"
  source: /note="Description of Combined DNA/RNA Molecule: Synthetic oligonucleotide"
auuauagugaguuauuuugtt

SEQ ID NO: 473 - DNA, 21 bp, Artificial Sequence
  source: /note="Description of Artificial Sequence: Synthetic oligonucleotide"
  source: /note="Description of Combined DNA/RNA Molecule: Synthetic oligonucleotide"
ugaaggccaauuuccagagtt

SEQ ID NO: 474 - DNA, 21 bp, Artificial Sequence
  source: /note="Description of Artificial Sequence: Synthetic oligonucleotide"
  source: /note="Description of Combined DNA/RNA Molecule: Synthetic oligonucleotide"
uauuauaaaaauaucuugctt

SEQ ID NO: 475 - DNA, 21 bp, Artificial Sequence
  source: /note="Description of Artificial Sequence: Synthetic oligonucleotide"
  source: /note="Description of Combined DNA/RNA Molecule: Synthetic oligonucleotide"
uguacuugacaaaaacauutt

SEQ ID NO: 476 - DNA, 21 bp, Artificial Sequence
  source: /note="Description of Artificial Sequence: Synthetic oligonucleotide"
  source: /note="Description of Combined DNA/RNA Molecule: Synthetic oligonucleotide"
aaagguacuuguuguuuaatt

SEQ ID NO: 477 - DNA, 21 bp, Artificial Sequence
  source: /note="Description of Artificial Sequence: Synthetic oligonucleotide"
  source: /note="Description of Combined DNA/RNA Molecule: Synthetic oligonucleotide"
uccuucacagacuuucugatt

SEQ ID NO: 478 - DNA, 21 bp, Artificial Sequence
  source: /note="Description of Artificial Sequence: Synthetic oligonucleotide"
  source: /note="Description of Combined DNA/RNA Molecule: Synthetic oligonucleotide"
uugcaucaaaugcuucagutt

SEQ ID NO: 479 - DNA, 21 bp, Artificial Sequence
  source: /note="Description of Artificial Sequence: Synthetic oligonucleotide"
  source: /note="Description of Combined DNA/RNA Molecule: Synthetic oligonucleotide"
gacauuuuaacacagaacutt

SEQ ID NO: 480 - DNA, 21 bp, Artificial Sequence
  source: /note="Description of Artificial Sequence: Synthetic oligonucleotide"
  source: /note="Description of Combined DNA/RNA Molecule: Synthetic oligonucleotide"
uccuuuuacacucaaaauctt

SEQ ID NO: 481 - DNA, 21 bp, Artificial Sequence
  source: /note="Description of Artificial Sequence: Synthetic oligonucleotide"
  source: /note="Description of Combined DNA/RNA Molecule: Synthetic oligonucleotide"
uucuuuacaagguucaucatt

SEQ ID NO: 482 - DNA, 21 bp, Artificial Sequence
  source: /note="Description of Artificial Sequence: Synthetic oligonucleotide"
  source: /note="Description of Combined DNA/RNA Molecule: Synthetic oligonucleotide"
aaugaaaaauguuccaaugtt

SEQ ID NO: 483 - DNA, 21 bp, Artificial Sequence
  source: /note="Description of Artificial Sequence: Synthetic oligonucleotide"
  source: /note="Description of Combined DNA/RNA Molecule: Synthetic oligonucleotide"
aauaacuccgaauuucuggtt

SEQ ID NO: 484 - DNA, 21 bp, Artificial Sequence
  source: /note="Description of Artificial Sequence: Synthetic oligonucleotide"
  source: /note="Description of Combined DNA/RNA Molecule: Synthetic oligonucleotide"
gugaguuuuaucucccaggtt

SEQ ID NO: 485 - DNA, 21 bp, Artificial Sequence
  source: /note="Description of Artificial Sequence: Synthetic oligonucleotide"
  source: /note="Description of Combined DNA/RNA Molecule: Synthetic oligonucleotide"
uuuacaagguucaucauuutt

SEQ ID NO: 486 - DNA, 21 bp, Artificial Sequence
  source: /note="Description of Artificial Sequence: Synthetic oligonucleotide"
  source: /note="Description of Combined DNA/RNA Molecule: Synthetic oligonucleotide"
aucaaaugugacuugagcatt

SEQ ID NO: 487 - DNA, 21 bp, Artificial Sequence
  source: /note="Description of Artificial Sequence: Synthetic oligonucleotide"
  source: /note="Description of Combined DNA/RNA Molecule: Synthetic oligonucleotide"
uuuauaagcauaugcaauctt

SEQ ID NO: 488 - DNA, 21 bp, Artificial Sequence
  source: /note="Description of Artificial Sequence: Synthetic oligonucleotide"
  source: /note="Description of Combined DNA/RNA Molecule: Synthetic oligonucleotide"
uaaauuuuuuaucaggauatt

SEQ ID NO: 489 - DNA, 21 bp, Artificial Sequence
  source: /note="Description of Artificial Sequence: Synthetic oligonucleotide"
  source: /note="Description of Combined DNA/RNA Molecule: Synthetic oligonucleotide"
aauaaaagcugcaaacuuctt

SEQ ID NO: 490 - DNA, 21 bp, Artificial Sequence
  source: /note="Description of Artificial Sequence: Synthetic oligonucleotide"
  source: /note="Description of Combined DNA/RNA Molecule: Synthetic oligonucleotide"
uccaauaugaucaauuucutt

SEQ ID NO: 491 - DNA, 21 bp, Artificial Sequence
  source: /note="Description of Artificial Sequence: Synthetic oligonucleotide"
  source: /note="Description of Combined DNA/RNA Molecule: Synthetic oligonucleotide"
aacuaaauuuuuuaucaggtt

SEQ ID NO: 492 - DNA, 21 bp, Artificial Sequence
  source: /note="Description of Artificial Sequence: Synthetic oligonucleotide"
  source: /note="Description of Combined DNA/RNA Molecule: Synthetic oligonucleotide"
uuuacuaagauuucuuuuctt

SEQ ID NO: 493 - DNA, 21 bp, Artificial Sequence
  source: /note="Description of Artificial Sequence: Synthetic oligonucleotide"
  source: /note="Description of Combined DNA/RNA Molecule: Synthetic oligonucleotide"
aauguuuauacuuugauaatt

SEQ ID NO: 494 - DNA, 21 bp, Artificial Sequence
  source: /note="Description of Artificial Sequence: Synthetic oligonucleotide"
  source: /note="Description of Combined DNA/RNA Molecule: Synthetic oligonucleotide"
accaaauucaguuuguaggtt

SEQ ID NO: 495 - DNA, 21 bp, Artificial Sequence
  source: /note="Description of Artificial Sequence: Synthetic oligonucleotide"
  source: /note="Description of Combined DNA/RNA Molecule: Synthetic oligonucleotide"
aaugacauauguuugcucctt

SEQ ID NO: 496 - DNA, 21 bp, Artificial Sequence
  source: /note="Description of Artificial Sequence: Synthetic oligonucleotide"
  source: /note="Description of Combined DNA/RNA Molecule: Synthetic oligonucleotide"
ugaacuacaguuguuacautt

SEQ ID NO: 497 - DNA, 21 bp, Artificial Sequence
  source: /note="Description of Artificial Sequence: Synthetic oligonucleotide"
  source: /note="Description of Combined DNA/RNA Molecule: Synthetic oligonucleotide"
aaauguuccaaugauuucctt

SEQ ID NO: 498 - DNA, 21 bp, Artificial Sequence
  source: /note="Description of Artificial Sequence: Synthetic oligonucleotide"
  source: /note="Description of Combined DNA/RNA Molecule: Synthetic oligonucleotide"
aguaauuucaaaauucuuatt

SEQ ID NO: 499 - DNA, 21 bp, Artificial Sequence
  source: /note="Description of Artificial Sequence: Synthetic oligonucleotide"
  source: /note="Description of Combined DNA/RNA Molecule: Synthetic oligonucleotide"
aucgaauucaguugcagaatt

SEQ ID NO: 500 - DNA, 21 bp, Artificial Sequence
  source: /note="Description of Artificial Sequence: Synthetic oligonucleotide"
  source: /note="Description of Combined DNA/RNA Molecule: Synthetic oligonucleotide"
ugaaauacucuuuccaaggtt

SEQ ID NO: 501 - DNA, 21 bp, Artificial Sequence
  source: /note="Description of Artificial Sequence: Synthetic oligonucleotide"
  source: /note="Description of Combined DNA/RNA Molecule: Synthetic oligonucleotide"
guaacuaaauuuuuuaucatt

SEQ ID NO: 502 - DNA, 21 bp, Artificial Sequence
  source: /note="Description of Artificial Sequence: Synthetic oligonucleotide"
  source: /note="Description of Combined DNA/RNA Molecule: Synthetic oligonucleotide"
uugaaauacucuuuccaagtt

SEQ ID NO: 503 - DNA, 21 bp, Artificial Sequence
  source: /note="Description of Artificial Sequence: Synthetic oligonucleotide"
  source: /note="Description of Combined DNA/RNA Molecule: Synthetic oligonucleotide"
aaaucaaguaauuauagugtt

SEQ ID NO: 504 - DNA, 21 bp, Artificial Sequence
  source: /note="Description of Artificial Sequence: Synthetic oligonucleotide"
  source: /note="Description of Combined DNA/RNA Molecule: Synthetic oligonucleotide"
aaguaauuauagugaguuatt

SEQ ID NO: 505 - DNA, 21 bp, Artificial Sequence
  source: /note="Description of Artificial Sequence: Synthetic oligonucleotide"
  source: /note="Description of Combined DNA/RNA Molecule: Synthetic oligonucleotide"
uuauagugaguuauuuugutt

SEQ ID NO: 506 - DNA, 21 bp, Artificial Sequence
  source: /note="Description of Artificial Sequence: Synthetic oligonucleotide"
  source: /note="Description of Combined DNA/RNA Molecule: Synthetic oligonucleotide"
aaggccaauuuccagaggatt

SEQ ID NO: 507 - DNA, 21 bp, Artificial Sequence
  source: /note="Description of Artificial Sequence: Synthetic oligonucleotide"
  source: /note="Description of Combined DNA/RNA Molecule: Synthetic oligonucleotide"
auuauagugaguuauuuugtt

SEQ ID NO: 508 - DNA, 21 bp, Artificial Sequence
  source: /note="Description of Artificial Sequence: Synthetic oligonucleotide"
  source: /note="Description of Combined DNA/RNA Molecule: Synthetic oligonucleotide"
ugaaggccaauuuccagagtt

SEQ ID NO: 509 - DNA, 21 bp, Artificial Sequence
  source: /note="Description of Artificial Sequence: Synthetic oligonucleotide"
  source: /note="Description of Combined DNA/RNA Molecule: Synthetic oligonucleotide"
uauuauaaaaauaucuugctt

SEQ ID NO: 510 - DNA, 21 bp, Artificial Sequence
  source: /note="Description of Artificial Sequence: Synthetic oligonucleotide"
  source: /note="Description of Combined DNA/RNA Molecule: Synthetic oligonucleotide"
uguacuugacaaaaacauutt

SEQ ID NO: 511 - DNA, 21 bp, Artificial Sequence
  source: /note="Description of Artificial Sequence: Synthetic oligonucleotide"
  source: /note="Description of Combined DNA/RNA Molecule: Synthetic oligonucleotide"
aaagguacuuguuguuuaatt

SEQ ID NO: 512 - DNA, 21 bp, Artificial Sequence
  source: /note="Description of Artificial Sequence: Synthetic oligonucleotide"
  source: /note="Description of Combined DNA/RNA Molecule: Synthetic oligonucleotide"
uccuucacagacuuucugatt

SEQ ID NO: 513 - DNA, 21 bp, Artificial Sequence
  source: /note="Description of Artificial Sequence: Synthetic oligonucleotide"
  source: /note="Description of Combined DNA/RNA Molecule: Synthetic oligonucleotide"
uugcaucaaaugcuucagutt

SEQ ID NO: 514 - DNA, 21 bp, Artificial Sequence
  source: /note="Description of Artificial Sequence: Synthetic oligonucleotide"
  source: /note="Description of Combined DNA/RNA Molecule: Synthetic oligonucleotide"
gacauuuuaacacagaacutt

SEQ ID NO: 515 - DNA, 21 bp, Artificial Sequence
  source: /note="Description of Artificial Sequence: Synthetic oligonucleotide"
  source: /note="Description of Combined DNA/RNA Molecule: Synthetic oligonucleotide"
aaaucaaguaauuauagugtt

SEQ ID NO: 516 - DNA, 21 bp, Artificial Sequence
  source: /note="Description of Artificial Sequence: Synthetic oligonucleotide"
  source: /note="Description of Combined DNA/RNA Molecule: Synthetic oligonucleotide"
aaguaauuauagugaguuatt

SEQ ID NO: 517 - DNA, 21 bp, Artificial Sequence
  source: /note="Description of Artificial Sequence: Synthetic oligonucleotide"
  source: /note="Description of Combined DNA/RNA Molecule: Synthetic oligonucleotide"
uuauagugaguuauuuugutt

SEQ ID NO: 518 - DNA, 21 bp, Artificial Sequence
  source: /note="Description of Artificial Sequence: Synthetic oligonucleotide"
  source: /note="Description of Combined DNA/RNA Molecule: Synthetic oligonucleotide"
aaggccaauuuccagaggatt

SEQ ID NO: 519 - DNA, 21 bp, Artificial Sequence
  source: /note="Description of Artificial Sequence: Synthetic oligonucleotide"
  source: /note="Description of Combined DNA/RNA Molecule: Synthetic oligonucleotide"
auuauagugaguuauuuugtt

SEQ ID NO: 520 - DNA, 21 bp, Artificial Sequence
  source: /note="Description of Artificial Sequence: Synthetic oligonucleotide"
  source: /note="Description of Combined DNA/RNA Molecule: Synthetic oligonucleotide"
ugaaggccaauuuccagagtt

SEQ ID NO: 521 - DNA, 21 bp, Artificial Sequence
  source: /note="Description of Artificial Sequence: Synthetic oligonucleotide"
  source: /note="Description of Combined DNA/RNA Molecule: Synthetic oligonucleotide"
uauuauaaaaauaucuugctt

SEQ ID NO: 522 - DNA, 21 bp, Artificial Sequence
  source: /note="Description of Artificial Sequence: Synthetic oligonucleotide"
  source: /note="Description of Combined DNA/RNA Molecule: Synthetic oligonucleotide"
uguacuugacaaaaacauutt

SEQ ID NO: 523 - DNA, 21 bp, Artificial Sequence
  source: /note="Description of Artificial Sequence: Synthetic oligonucleotide"
  source: /note="Description of Combined DNA/RNA Molecule: Synthetic oligonucleotide"
aaagguacuuguuguuuaatt

SEQ ID NO: 524 - DNA, 21 bp, Artificial Sequence
  source: /note="Description of Artificial Sequence: Synthetic oligonucleotide"
  source: /note="Description of Combined DNA/RNA Molecule: Synthetic oligonucleotide"
uccuucacagacuuucugatt

SEQ ID NO: 525 - DNA, 21 bp, Artificial Sequence
  source: /note="Description of Artificial Sequence: Synthetic oligonucleotide"
  source: /note="Description of Combined DNA/RNA Molecule: Synthetic oligonucleotide"
uugcaucaaaugcuucagutt

SEQ ID NO: 526 - DNA, 21 bp, Artificial Sequence
  source: /note="Description of Artificial Sequence: Synthetic oligonucleotide"
  source: /note="Description of Combined DNA/RNA Molecule: Synthetic oligonucleotide"
gacauuuuaacacagaacutt

SEQ ID NO: 527 - DNA, 21 bp, Artificial Sequence
  source: /note="Description of Artificial Sequence: Synthetic oligonucleotide"
  source: /note="Description of Combined DNA/RNA Molecule: Synthetic oligonucleotide"
aaaucaaguaauuauagugtt

SEQ ID NO: 528 - DNA, 21 bp, Artificial Sequence
  source: /note="Description of Artificial Sequence: Synthetic oligonucleotide"
  source: /note="Description of Combined DNA/RNA Molecule: Synthetic oligonucleotide"
aaguaauuauagugaguuatt

SEQ ID NO: 529 - DNA, 21 bp, Artificial Sequence
  source: /note="Description of Artificial Sequence: Synthetic oligonucleotide"
  source: /note="Description of Combined DNA/RNA Molecule: Synthetic oligonucleotide"
uuauagugaguuauuuugutt

SEQ ID NO: 530 - DNA, 21 bp, Artificial Sequence
  source: /note="Description of Artificial Sequence: Synthetic oligonucleotide"
  source: /note="Description of Combined DNA/RNA Molecule: Synthetic oligonucleotide"
aaggccaauuuccagaggatt

SEQ ID NO: 531 - DNA, 21 bp, Artificial Sequence
  source: /note="Description of Artificial Sequence: Synthetic oligonucleotide"
  source: /note="Description of Combined DNA/RNA Molecule: Synthetic oligonucleotide"
auuauagugaguuauuuugtt

SEQ ID NO: 532 - DNA, 21 bp, Artificial Sequence
  source: /note="Description of Artificial Sequence: Synthetic oligonucleotide"
  source: /note="Description of Combined DNA/RNA Molecule: Synthetic oligonucleotide"
ugaaggccaauuuccagagtt

SEQ ID NO: 533 - DNA, 21 bp, Artificial Sequence
  source: /note="Description of Artificial Sequence: Synthetic oligonucleotide"
  source: /note="Description of Combined DNA/RNA Molecule: Synthetic oligonucleotide"
uauuauaaaaauaucuugctt

SEQ ID NO: 534 - DNA, 21 bp, Artificial Sequence
  source: /note="Description of Artificial Sequence: Synthetic oligonucleotide"
  source: /note="Description of Combined DNA/RNA Molecule: Synthetic oligonucleotide"
uguacuugacaaaaacauutt

SEQ ID NO: 535 - DNA, 21 bp, Artificial Sequence
  source: /note="Description of Artificial Sequence: Synthetic oligonucleotide"
  source: /note="Description of Combined DNA/RNA Molecule: Synthetic oligonucleotide"
aaagguacuuguuguuuaatt

SEQ ID NO: 536 - DNA, 21 bp, Artificial Sequence
  source: /note="Description of Artificial Sequence: Synthetic oligonucleotide"
  source: /note="Description of Combined DNA/RNA Molecule: Synthetic oligonucleotide"
uccuucacagacuuucugatt

SEQ ID NO: 537 - DNA, 21 bp, Artificial Sequence
  source: /note="Description of Artificial Sequence: Synthetic oligonucleotide"
  source: /note="Description of Combined DNA/RNA Molecule: Synthetic oligonucleotide"
uugcaucaaaugcuucagutt

SEQ ID NO: 538 - DNA, 21 bp, Artificial Sequence
  source: /note="Description of Artificial Sequence: Synthetic oligonucleotide"
  source: /note="Description of Combined DNA/RNA Molecule: Synthetic oligonucleotide"
gacauuuuaacacagaacutt

SEQ ID NO: 539 - DNA, 21 bp, Artificial Sequence
  source: /note="Description of Artificial Sequence: Synthetic oligonucleotide"
  source: /note="Description of Combined DNA/RNA Molecule: Synthetic oligonucleotide"
aaaucaaguaauuauagugtt

SEQ ID NO: 540 - DNA, 21 bp, Artificial Sequence
  source: /note="Description of Artificial Sequence: Synthetic oligonucleotide"
  source: /note="Description of Combined DNA/RNA Molecule: Synthetic oligonucleotide"
aaguaauuauagugaguuatt

SEQ ID NO: 541 - DNA, 21 bp, Artificial Sequence
  source: /note="Description of Artificial Sequence: Synthetic oligonucleotide"
  source: /note="Description of Combined DNA/RNA Molecule: Synthetic oligonucleotide"
uuauagugaguuauuuugutt

SEQ ID NO: 542 - DNA, 21 bp, Artificial Sequence
  source: /note="Description of Artificial Sequence: Synthetic oligonucleotide"
  source: /note="Description of Combined DNA/RNA Molecule: Synthetic oligonucleotide"
aaggccaauuuccagaggatt

SEQ ID NO: 543 - DNA, 21 bp, Artificial Sequence
  source: /note="Description of Artificial Sequence: Synthetic oligonucleotide"
  source: /note="Description of Combined DNA/RNA Molecule: Synthetic oligonucleotide"
auuauagugaguuauuuugtt

SEQ ID NO: 544 - DNA, 21 bp, Artificial Sequence
  source: /note="Description of Artificial Sequence: Synthetic oligonucleotide"
  source: /note="Description of Combined DNA/RNA Molecule: Synthetic oligonucleotide"
ugaaggccaauuuccagagtt

SEQ ID NO: 545 - DNA, 21 bp, Artificial Sequence
  source: /note="Description of Artificial Sequence: Synthetic oligonucleotide"
  source: /note="Description of Combined DNA/RNA Molecule: Synthetic oligonucleotide"
uauuauaaaaauaucuugctt

SEQ ID NO: 546 - DNA, 21 bp, Artificial Sequence
  source: /note="Description of Artificial Sequence: Synthetic oligonucleotide"
  source: /note="Description of Combined DNA/RNA Molecule: Synthetic oligonucleotide"
uguacuugacaaaaacauutt

SEQ ID NO: 547 - DNA, 21 bp, Artificial Sequence
  source: /note="Description of Artificial Sequence: Synthetic oligonucleotide"
  source: /note="Description of Combined DNA/RNA Molecule: Synthetic oligonucleotide"
aaagguacuuguuguuuaatt

SEQ ID NO: 548 - DNA, 21 bp, Artificial Sequence
  source: /note="Description of Artificial Sequence: Synthetic oligonucleotide"
  source: /note="Description of Combined DNA/RNA Molecule: Synthetic oligonucleotide"
uccuucacagacuuucugatt

SEQ ID NO: 549 - DNA, 21 bp, Artificial Sequence
  source: /note="Description of Artificial Sequence: Synthetic oligonucleotide"
  source: /note="Description of Combined DNA/RNA Molecule: Synthetic oligonucleotide"
uugcaucaaaugcuucagutt

SEQ ID NO: 550 - DNA, 21 bp, Artificial Sequence
  source: /note="Description of Artificial Sequence: Synthetic oligonucleotide"
  source: /note="Description of Combined DNA/RNA Molecule: Synthetic oligonucleotide"
gacauuuuaacacagaacutt

SEQ ID NO: 551 - RNA, 21 nt, Artificial Sequence
  source: /note="Description of Artificial Sequence: Synthetic oligonucleotide"
gacaaaauaacucacuauaau

SEQ ID NO: 552 - RNA, 21 nt, Artificial Sequence
  source: /note="Description of Artificial Sequence: Synthetic oligonucleotide"
gacaaaauaacucacuauaau

SEQ ID NO: 553 - RNA, 21 nt, Artificial Sequence
  source: /note="Description of Artificial Sequence: Synthetic oligonucleotide"
cagaucaaacacaauuucagu

SEQ ID NO: 554 - RNA, 21 nt, Artificial Sequence
  source: /note="Description of Artificial Sequence: Synthetic oligonucleotide"
cagaucaaacacaauuucagu

SEQ ID NO: 555 - RNA, 23 nt, Artificial Sequence
  source: /note="Description of Artificial Sequence: Synthetic oligonucleotide"
auuauagugaguuauuuugucaa

SEQ ID NO: 556 - RNA, 23 nt, Artificial Sequence
  source: /note="Description of Artificial Sequence: Synthetic oligonucleotide"
auuauagugaguuauuuugucaa

SEQ ID NO: 557 - RNA, 23 nt, Artificial Sequence
  source: /note="Description of Artificial Sequence: Synthetic oligonucleotide"
acugaaauuguguuugaucugca

SEQ ID NO: 558 - RNA, 23 nt, Artificial Sequence
  source: /note="Description of Artificial Sequence: Synthetic oligonucleotide"
acugaaauuguguuugaucugca

SEQ ID NO: 559 - RNA, 21 nt, Artificial Sequence
  source: /note="Description of Artificial Sequence: Synthetic oligonucleotide"
auuuaaacaacaaguaccuuu

SEQ ID NO: 560 - RNA, 21 nt, Artificial Sequence
  source: /note="Description of Artificial Sequence: Synthetic oligonucleotide"
auuuaaacaacaaguaccuuu

SEQ ID NO: 561 - RNA, 21 nt, Artificial Sequence
  source: /note="Description of Artificial Sequence: Synthetic oligonucleotide"
auuuaaacaacaaguaccuuu

SEQ ID NO: 562 - RNA, 21 nt, Artificial Sequence
  source: /note="Description of Artificial Sequence: Synthetic oligonucleotide"
ugacaaaauaacucacuauaa

SEQ ID NO: 563 - RNA, 21 nt, Artificial Sequence
  source: /note="Description of Artificial Sequence: Synthetic oligonucleotide"
ugacaaaauaacucacuauaa

SEQ ID NO: 564 - RNA, 21 nt, Artificial Sequence
  source: /note="Description of Artificial Sequence: Synthetic oligonucleotide"
ugacaaaauaacucacuauaa

SEQ ID NO: 565 - RNA, 21 nt, Artificial Sequence
  source: /note="Description of Artificial Sequence: Synthetic oligonucleotide"
gacaaaauaacucacuauaau

SEQ ID NO: 566 - RNA, 21 nt, Artificial Sequence
  source: /note="Description of Artificial Sequence: Synthetic oligonucleotide"
gacaaaauaacucacuauaau

SEQ ID NO: 567 - RNA, 21 nt, Artificial Sequence
  source: /note="Description of Artificial Sequence: Synthetic oligonucleotide"
gacaaaauaacucacuauaau

SEQ ID NO: 568 - RNA, 21 nt, Artificial Sequence
  source: /note="Description of Artificial Sequence: Synthetic oligonucleotide"
guuccggauauuugaacuuuu

SEQ ID NO: 569 - RNA, 21 nt, Artificial Sequence
  source: /note="Description of Artificial Sequence: Synthetic oligonucleotide"
guuccggauauuugaacuuuu

SEQ ID NO: 570 - RNA, 21 nt, Artificial Sequence
  source: /note="Description of Artificial Sequence: Synthetic oligonucleotide"
guuccggauauuugaacuuuu

SEQ ID NO: 571 - RNA, 21 nt, Artificial Sequence
  source: /note="Description of Artificial Sequence: Synthetic oligonucleotide"
ugcagaucaaacacaauuuca

SEQ ID NO: 572 - RNA, 21 nt, Artificial Sequence
  source: /note="Description of Artificial Sequence: Synthetic oligonucleotide"
ugcagaucaaacacaauuuca

SEQ ID NO: 573 - RNA, 21 nt, Artificial Sequence
  source: /note="Description of Artificial Sequence: Synthetic oligonucleotide"
ugcagaucaaacacaauuuca

SEQ ID NO: 574 - RNA, 21 nt, Artificial Sequence
  source: /note="Description of Artificial Sequence: Synthetic oligonucleotide"
aagcaagauauuuuuauaaua

SEQ ID NO: 575 - RNA, 21 nt, Artificial Sequence
  source: /note="Description of Artificial Sequence: Synthetic oligonucleotide"
aagcaagauauuuuuauaaua

SEQ ID NO: 576 - RNA, 21 nt, Artificial Sequence
  source: /note="Description of Artificial Sequence: Synthetic oligonucleotide"
aagcaagauauuuuuauaaua

SEQ ID NO: 577 - RNA, 21 nt, Artificial Sequence
  source: /note="Description of Artificial Sequence: Synthetic oligonucleotide"
cagaucaaacacaauuucagu

SEQ ID NO: 578 - RNA, 21 nt, Artificial Sequence
  source: /note="Description of Artificial Sequence: Synthetic oligonucleotide"
cagaucaaacacaauuucagu

SEQ ID NO: 579 - RNA, 21 nt, Artificial Sequence
  source: /note="Description of Artificial Sequence: Synthetic oligonucleotide"
cagaucaaacacaauuucagu

SEQ ID NO: 580 - RNA, 23 nt, Artificial Sequence
  source: /note="Description of Artificial Sequence: Synthetic oligonucleotide"
aaagguacuuguuguuuaaaucu

SEQ ID NO: 581 - RNA, 23 nt, Artificial Sequence
  source: /note="Description of Artificial Sequence: Synthetic oligonucleotide"
aaagguacuuguuguuuaaaucu

SEQ ID NO: 582 - RNA, 23 nt, Artificial Sequence
  source: /note="Description of Artificial Sequence: Synthetic oligonucleotide"
aaagguacuuguuguuuaaaucu

SEQ ID NO: 583 - RNA, 23 nt, Artificial Sequence
  source: /note="Description of Artificial Sequence: Synthetic oligonucleotide"
uuauagugaguuauuuugucaau

SEQ ID NO: 584 - RNA, 23 nt, Artificial Sequence
  source: /note="Description of Artificial Sequence: Synthetic oligonucleotide"
uuauagugaguuauuuugucaau

SEQ ID NO: 585 - RNA, 23 nt, Artificial Sequence
  source: /note="Description of Artificial Sequence: Synthetic oligonucleotide"
uuauagugaguuauuuugucaau

SEQ ID NO: 586 - RNA, 23 nt, Artificial Sequence
  source: /note="Description of Artificial Sequence: Synthetic oligonucleotide"
auuauagugaguuauuuugucaa

SEQ ID NO: 587 - RNA, 23 nt, Artificial Sequence
  source: /note="Description of Artificial Sequence: Synthetic oligonucleotide"
auuauagugaguuauuuugucaa

SEQ ID NO: 588 - RNA, 23 nt, Artificial Sequence
  source: /note="Description of Artificial Sequence: Synthetic oligonucleotide"
auuauagugaguuauuuugucaa

SEQ ID NO: 589 - RNA, 23 nt, Artificial Sequence
  source: /note="Description of Artificial Sequence: Synthetic oligonucleotide"
aaaaguucaaauauccggaaccg

SEQ ID NO: 590 - RNA, 23 nt, Artificial Sequence
  source: /note="Description of Artificial Sequence: Synthetic oligonucleotide"
aaaaguucaaauauccggaaccg

SEQ ID NO: 591 - RNA, 23 nt, Artificial Sequence
  source: /note="Description of Artificial Sequence: Synthetic oligonucleotide"
aaaaguucaaauauccggaaccg

SEQ ID NO: 592 - RNA, 23 nt, Artificial Sequence
  source: /note="Description of Artificial Sequence: Synthetic oligonucleotide"
ugaaauuguguuugaucugcaga

SEQ ID NO: 593 - RNA, 23 nt, Artificial Sequence
  source: /note="Description of Artificial Sequence: Synthetic oligonucleotide"
ugaaauuguguuugaucugcaga

SEQ ID NO: 594 - RNA, 23 nt, Artificial Sequence
  source: /note="Description of Artificial Sequence: Synthetic oligonucleotide"
ugaaauuguguuugaucugcaga

SEQ ID NO: 595 - RNA, 23 nt, Artificial Sequence
  source: /note="Description of Artificial Sequence: Synthetic oligonucleotide"
uauuauaaaaauaucuugcuuuu

SEQ ID NO: 596 - RNA, 23 nt, Artificial Sequence
  source: /note="Description of Artificial Sequence: Synthetic oligonucleotide"
uauuauaaaaauaucuugcuuuu

SEQ ID NO: 597 - RNA, 23 nt, Artificial Sequence
  source: /note="Description of Artificial Sequence: Synthetic oligonucleotide"
uauuauaaaaauaucuugcuuuu

SEQ ID NO: 598 - RNA, 23 nt, Artificial Sequence
  source: /note="Description of Artificial Sequence: Synthetic oligonucleotide"
acugaaauuguguuugaucugca

SEQ ID NO: 599 - RNA, 23 nt, Artificial Sequence
  source: /note="Description of Artificial Sequence: Synthetic oligonucleotide"
acugaaauuguguuugaucugca

SEQ ID NO: 600 - RNA, 23 nt, Artificial Sequence
  source: /note="Description of Artificial Sequence: Synthetic oligonucleotide"
acugaaauuguguuugaucugca

SEQ ID NO: 601 - RNA, 19 nt, Artificial Sequence
  source: /note="Description of Artificial Sequence: Synthetic oligonucleotide"
uauccgugguuuccugcua

SEQ ID NO: 602 - RNA, 19 nt, Artificial Sequence
  source: /note="Description of Artificial Sequence: Synthetic oligonucleotide"
gguuuccugcuaccuccaa

SEQ ID NO: 603 - RNA, 19 nt, Artificial Sequence
  source: /note="Description of Artificial Sequence: Synthetic oligonucleotide"
ccuccaaccaugggccuuu

SEQ ID NO: 604 - RNA, 19 nt, Artificial Sequence
  source: /note="Description of Artificial Sequence: Synthetic oligonucleotide"
gggccuuuugggaauacuu

SEQ ID NO: 605 - RNA, 19 nt, Artificial Sequence
  source: /note="Description of Artificial Sequence: Synthetic oligonucleotide"
ggaauacuuuguuuuuuaa

SEQ ID NO: 606 - RNA, 19 nt, Artificial Sequence
  source: /note="Description of Artificial Sequence: Synthetic oligonucleotide"
cuuuguuuuuuaaucuucc

SEQ ID NO: 607 - RNA, 19 nt, Artificial Sequence
  source: /note="Description of Artificial Sequence: Synthetic oligonucleotide"
cuuccuggggaaaaccugg

SEQ ID NO: 608 - RNA, 19 nt, Artificial Sequence
  source: /note="Description of Artificial Sequence: Synthetic oligonucleotide"
ggaaaaccuggggacagga

SEQ ID NO: 609 - RNA, 19 nt, Artificial Sequence
  source: /note="Description of Artificial Sequence: Synthetic oligonucleotide"
gggacaggagcaaacauau

SEQ ID NO: 610 - RNA, 19 nt, Artificial Sequence
  source: /note="Description of Artificial Sequence: Synthetic oligonucleotide"
caaacauaugucauuucag

SEQ ID NO: 611 - RNA, 19 nt, Artificial Sequence
  source: /note="Description of Artificial Sequence: Synthetic oligonucleotide"
cauuucagcaccaaaaaua

SEQ ID NO: 612 - RNA, 19 nt, Artificial Sequence
  source: /note="Description of Artificial Sequence: Synthetic oligonucleotide"
gcaccaaaaauauuccgug

SEQ ID NO: 613 - RNA, 19 nt, Artificial Sequence
  source: /note="Description of Artificial Sequence: Synthetic oligonucleotide"
ccguguuggagcaucugaa

SEQ ID NO: 614 - RNA, 19 nt, Artificial Sequence
  source: /note="Description of Artificial Sequence: Synthetic oligonucleotide"
ggagcaucugaaaauauug

SEQ ID NO: 615 - RNA, 19 nt, Artificial Sequence
  source: /note="Description of Artificial Sequence: Synthetic oligonucleotide"
gaaaauauugugauucaag

SEQ ID NO: 616 - RNA, 19 nt, Artificial Sequence
  source: /note="Description of Artificial Sequence: Synthetic oligonucleotide"
gauucaaguuuauggauac

SEQ ID NO: 617 - RNA, 19 nt, Artificial Sequence
  source: /note="Description of Artificial Sequence: Synthetic oligonucleotide"
ggauacacugaagcauuug

SEQ ID NO: 618 - RNA, 19 nt, Artificial Sequence
  source: /note="Description of Artificial Sequence: Synthetic oligonucleotide"
gaagcauuugaugcaacaa

SEQ ID NO: 619 - RNA, 19 nt, Artificial Sequence
  source: /note="Description of Artificial Sequence: Synthetic oligonucleotide"
ugcaacaaucucuauuaaa

SEQ ID NO: 620 - RNA, 19 nt, Artificial Sequence
  source: /note="Description of Artificial Sequence: Synthetic oligonucleotide"
aaucucuauuaaaaguuau

SEQ ID NO: 621 - RNA, 19 nt, Artificial Sequence
  source: /note="Description of Artificial Sequence: Synthetic oligonucleotide"
aaguuauccugauaaaaaa

SEQ ID NO: 622 - RNA, 19 nt, Artificial Sequence
  source: /note="Description of Artificial Sequence: Synthetic oligonucleotide"
cugauaaaaaauuuaguua

SEQ ID NO: 623 - RNA, 19 nt, Artificial Sequence
  source: /note="Description of Artificial Sequence: Synthetic oligonucleotide"
uuaguuacuccucaggcca

SEQ ID NO: 624 - RNA, 19 nt, Artificial Sequence
  source: /note="Description of Artificial Sequence: Synthetic oligonucleotide"
ccucaggccauguucauuu

SEQ ID NO: 625 - RNA, 19 nt, Artificial Sequence
  source: /note="Description of Artificial Sequence: Synthetic oligonucleotide"
uucauuuauccucagagaa

SEQ ID NO: 626 - RNA, 19 nt, Artificial Sequence
  source: /note="Description of Artificial Sequence: Synthetic oligonucleotide"
cucagagaauaaauuccaa

SEQ ID NO: 627 - RNA, 19 nt, Artificial Sequence
  source: /note="Description of Artificial Sequence: Synthetic oligonucleotide"
aauaaauuccaaaacucug

SEQ ID NO: 628 - RNA, 19 nt, Artificial Sequence
  source: /note="Description of Artificial Sequence: Synthetic oligonucleotide"
cucugcaaucuuaacaaua

SEQ ID NO: 629 - RNA, 19 nt, Artificial Sequence
  source: /note="Description of Artificial Sequence: Synthetic oligonucleotide"
cuuaacaauacaaccaaaa

SEQ ID NO: 630 - RNA, 19 nt, Artificial Sequence
  source: /note="Description of Artificial Sequence: Synthetic oligonucleotide"
caaccaaaacaauugccug

SEQ ID NO: 631 - RNA, 19 nt, Artificial Sequence
  source: /note="Description of Artificial Sequence: Synthetic oligonucleotide"
caauugccuggaggacaaa

SEQ ID NO: 632 - RNA, 19 nt, Artificial Sequence
  source: /note="Description of Artificial Sequence: Synthetic oligonucleotide"
ggacaaaacccaguuucuu

SEQ ID NO: 633 - RNA, 19 nt, Artificial Sequence
  source: /note="Description of Artificial Sequence: Synthetic oligonucleotide"
ccaguuucuuauguguauu

SEQ ID NO: 634 - RNA, 19 nt, Artificial Sequence
  source: /note="Description of Artificial Sequence: Synthetic oligonucleotide"
auguguauuuggaaguugu

SEQ ID NO: 635 - RNA, 19 nt, Artificial Sequence
  source: /note="Description of Artificial Sequence: Synthetic oligonucleotide"
ggaaguuguaucaaagcau

SEQ ID NO: 636 - RNA, 19 nt, Artificial Sequence
  source: /note="Description of Artificial Sequence: Synthetic oligonucleotide"
guaucaaagcauuuuucaa

SEQ ID NO: 637 - RNA, 19 nt, Artificial Sequence
  source: /note="Description of Artificial Sequence: Synthetic oligonucleotide"
uuuucaaaaucaaaaagaa

SEQ ID NO: 638 - RNA, 19 nt, Artificial Sequence
  source: /note="Description of Artificial Sequence: Synthetic oligonucleotide"
caaaaagaaugccaauaac

SEQ ID NO: 639 - RNA, 19 nt, Artificial Sequence
  source: /note="Description of Artificial Sequence: Synthetic oligonucleotide"
gccaauaaccuaugacaau

SEQ ID NO: 640 - RNA, 19 nt, Artificial Sequence
  source: /note="Description of Artificial Sequence: Synthetic oligonucleotide"
ccuaugacaauggauuucu

SEQ ID NO: 641 - RNA, 19 nt, Artificial Sequence
  source: /note="Description of Artificial Sequence: Synthetic oligonucleotide"
uggauuucucuucauucau

SEQ ID NO: 642 - RNA, 19 nt, Artificial Sequence
  source: /note="Description of Artificial Sequence: Synthetic oligonucleotide"
cauucauacagacaaaccu

SEQ ID NO: 643 - RNA, 19 nt, Artificial Sequence
  source: /note="Description of Artificial Sequence: Synthetic oligonucleotide"
cagacaaaccuguuuauac

SEQ ID NO: 644 - RNA, 19 nt, Artificial Sequence
  source: /note="Description of Artificial Sequence: Synthetic oligonucleotide"
guuuauacuccagaccagu

SEQ ID NO: 645 - RNA, 19 nt, Artificial Sequence
  source: /note="Description of Artificial Sequence: Synthetic oligonucleotide"
agaccagucaguaaaaguu

SEQ ID NO: 646 - RNA, 19 nt, Artificial Sequence
  source: /note="Description of Artificial Sequence: Synthetic oligonucleotide"
aguaaaaguuagaguuuau

SEQ ID NO: 647 - RNA, 19 nt, Artificial Sequence
  source: /note="Description of Artificial Sequence: Synthetic oligonucleotide"
agaguuuauucguugaaug

SEQ ID NO: 648 - RNA, 19 nt, Artificial Sequence
  source: /note="Description of Artificial Sequence: Synthetic oligonucleotide"
cguugaaugacgacuugaa

SEQ ID NO: 649 - RNA, 19 nt, Artificial Sequence
  source: /note="Description of Artificial Sequence: Synthetic oligonucleotide"
cuugaagccagccaaaaga

SEQ ID NO: 650 - RNA, 19 nt, Artificial Sequence
  source: /note="Description of Artificial Sequence: Synthetic oligonucleotide"
ccagccaaaagagaaacug

SEQ ID NO: 651 - RNA, 19 nt, Artificial Sequence
  source: /note="Description of Artificial Sequence: Synthetic oligonucleotide"
aaacugucuuaacuuucau

SEQ ID NO: 652 - RNA, 19 nt, Artificial Sequence
  source: /note="Description of Artificial Sequence: Synthetic oligonucleotide"
aacuuucauagauccugaa

SEQ ID NO: 653 - RNA, 19 nt, Artificial Sequence
  source: /note="Description of Artificial Sequence: Synthetic oligonucleotide"
cauagauccugaaggauca

SEQ ID NO: 654 - RNA, 19 nt, Artificial Sequence
  source: /note="Description of Artificial Sequence: Synthetic oligonucleotide"
gaaggaucagaaguugaca

SEQ ID NO: 655 - RNA, 19 nt, Artificial Sequence
  source: /note="Description of Artificial Sequence: Synthetic oligonucleotide"
ugacaugguagaagaaauu

SEQ ID NO: 656 - RNA, 19 nt, Artificial Sequence
  source: /note="Description of Artificial Sequence: Synthetic oligonucleotide"
gaagaaauugaucauauug

SEQ ID NO: 657 - RNA, 19 nt, Artificial Sequence
  source: /note="Description of Artificial Sequence: Synthetic oligonucleotide"
gaucauauuggaauuaucu

SEQ ID NO: 658 - RNA, 19 nt, Artificial Sequence
  source: /note="Description of Artificial Sequence: Synthetic oligonucleotide"
ggaauuaucucuuuuccug

SEQ ID NO: 659 - RNA, 19 nt, Artificial Sequence
  source: /note="Description of Artificial Sequence: Synthetic oligonucleotide"
cucuuuuccugacuucaag

SEQ ID NO: 660 - RNA, 19 nt, Artificial Sequence
  source: /note="Description of Artificial Sequence: Synthetic oligonucleotide"
acuucaagauuccgucuaa

SEQ ID NO: 661 - RNA, 19 nt, Artificial Sequence
  source: /note="Description of Artificial Sequence: Synthetic oligonucleotide"
ccgucuaauccuagauaug

SEQ ID NO: 662 - RNA, 19 nt, Artificial Sequence
  source: /note="Description of Artificial Sequence: Synthetic oligonucleotide"
ccuagauaugguaugugga

SEQ ID NO: 663 - RNA, 19 nt, Artificial Sequence
  source: /note="Description of Artificial Sequence: Synthetic oligonucleotide"
uguggacgaucaaggcuaa

SEQ ID NO: 664 - RNA, 19 nt, Artificial Sequence
  source: /note="Description of Artificial Sequence: Synthetic oligonucleotide"
cgaucaaggcuaaauauaa

SEQ ID NO: 665 - RNA, 19 nt, Artificial Sequence
  source: /note="Description of Artificial Sequence: Synthetic oligonucleotide"
auauaaagaggacuuuuca

SEQ ID NO: 666 - RNA, 19 nt, Artificial Sequence
  source: /note="Description of Artificial Sequence: Synthetic oligonucleotide"
gaggacuuuucaacaacug

SEQ ID NO: 667 - RNA, 19 nt, Artificial Sequence
  source: /note="Description of Artificial Sequence: Synthetic oligonucleotide"
caacuggaaccgcauauuu

SEQ ID NO: 668 - RNA, 19 nt, Artificial Sequence
  source: /note="Description of Artificial Sequence: Synthetic oligonucleotide"
cgcauauuuugaaguuaaa

SEQ ID NO: 669 - RNA, 19 nt, Artificial Sequence
  source: /note="Description of Artificial Sequence: Synthetic oligonucleotide"
aaguuaaagaauaugucuu

SEQ ID NO: 670 - RNA, 19 nt, Artificial Sequence
  source: /note="Description of Artificial Sequence: Synthetic oligonucleotide"
gaauaugucuugccacauu

SEQ ID NO: 671 - RNA, 19 nt, Artificial Sequence
  source: /note="Description of Artificial Sequence: Synthetic oligonucleotide"
ccacauuuuucugucucaa

SEQ ID NO: 672 - RNA, 19 nt, Artificial Sequence
  source: /note="Description of Artificial Sequence: Synthetic oligonucleotide"
cugucucaaucgagccaga

SEQ ID NO: 673 - RNA, 19 nt, Artificial Sequence
  source: /note="Description of Artificial Sequence: Synthetic oligonucleotide"
caaucgagccagaauauaa

SEQ ID NO: 674 - RNA, 19 nt, Artificial Sequence
  source: /note="Description of Artificial Sequence: Synthetic oligonucleotide"
gaauauaauuucauugguu

SEQ ID NO: 675 - RNA, 19 nt, Artificial Sequence
  source: /note="Description of Artificial Sequence: Synthetic oligonucleotide"
auugguuacaagaacuuua

SEQ ID NO: 676 - RNA, 19 nt, Artificial Sequence
  source: /note="Description of Artificial Sequence: Synthetic oligonucleotide"
agaacuuuaagaauuuuga

SEQ ID NO: 677 - RNA, 19 nt, Artificial Sequence
  source: /note="Description of Artificial Sequence: Synthetic oligonucleotide"
gaauuuugaaauuacuaua

SEQ ID NO: 678 - RNA, 19 nt, Artificial Sequence
  source: /note="Description of Artificial Sequence: Synthetic oligonucleotide"
gaaauuacuauaaaagcaa

SEQ ID NO: 679 - RNA, 19 nt, Artificial Sequence
  source: /note="Description of Artificial Sequence: Synthetic oligonucleotide"
aaagcaagauauuuuuaua

SEQ ID NO: 680 - RNA, 19 nt, Artificial Sequence
  source: /note="Description of Artificial Sequence: Synthetic oligonucleotide"
auauuuuuauaauaaagua

SEQ ID NO: 681 - RNA, 19 nt, Artificial Sequence
  source: /note="Description of Artificial Sequence: Synthetic oligonucleotide"
aaguagucacugaggcuga

SEQ ID NO: 682 - RNA, 19 nt, Artificial Sequence
  source: /note="Description of Artificial Sequence: Synthetic oligonucleotide"
cacugaggcugacguuuau

SEQ ID NO: 683 - RNA, 19 nt, Artificial Sequence
  source: /note="Description of Artificial Sequence: Synthetic oligonucleotide"
cguuuauaucacauuugga

SEQ ID NO: 684 - RNA, 19 nt, Artificial Sequence
  source: /note="Description of Artificial Sequence: Synthetic oligonucleotide"
cacauuuggaauaagagaa

SEQ ID NO: 685 - RNA, 19 nt, Artificial Sequence
  source: /note="Description of Artificial Sequence: Synthetic oligonucleotide"
aauaagagaagacuuaaaa

SEQ ID NO: 686 - RNA, 19 nt, Artificial Sequence
  source: /note="Description of Artificial Sequence: Synthetic oligonucleotide"
cuuaaaagaugaucaaaaa

SEQ ID NO: 687 - RNA, 19 nt, Artificial Sequence
  source: /note="Description of Artificial Sequence: Synthetic oligonucleotide"
gaugaucaaaaagaaauga

SEQ ID NO: 688 - RNA, 19 nt, Artificial Sequence
  source: /note="Description of Artificial Sequence: Synthetic oligonucleotide"
aaaugaugcaaacagcaau

SEQ ID NO: 689 - RNA, 19 nt, Artificial Sequence
  source: /note="Description of Artificial Sequence: Synthetic oligonucleotide"
acagcaaugcaaaacacaa

SEQ ID NO: 690 - RNA, 19 nt, Artificial Sequence
  source: /note="Description of Artificial Sequence: Synthetic oligonucleotide"
aaaacacaauguugauaaa

SEQ ID NO: 691 - RNA, 19 nt, Artificial Sequence
  source: /note="Description of Artificial Sequence: Synthetic oligonucleotide"
caauguugauaaauggaau

SEQ ID NO: 692 - RNA, 19 nt, Artificial Sequence
  source: /note="Description of Artificial Sequence: Synthetic oligonucleotide"
ggaauugcucaagucacau

SEQ ID NO: 693 - RNA, 19 nt, Artificial Sequence
  source: /note="Description of Artificial Sequence: Synthetic oligonucleotide"
gcucaagucacauuugauu

SEQ ID NO: 694 - RNA, 19 nt, Artificial Sequence
  source: /note="Description of Artificial Sequence: Synthetic oligonucleotide"
auuugauucugaaacagca

SEQ ID NO: 695 - RNA, 19 nt, Artificial Sequence
  source: /note="Description of Artificial Sequence: Synthetic oligonucleotide"
ugaaacagcagucaaagaa

SEQ ID NO: 696 - RNA, 19 nt, Artificial Sequence
  source: /note="Description of Artificial Sequence: Synthetic oligonucleotide"
caaagaacugucauacuac

SEQ ID NO: 697 - RNA, 19 nt, Artificial Sequence
  source: /note="Description of Artificial Sequence: Synthetic oligonucleotide"
cauacuacaguuuagaaga

SEQ ID NO: 698 - RNA, 19 nt, Artificial Sequence
  source: /note="Description of Artificial Sequence: Synthetic oligonucleotide"
caguuuagaagauuuaaac

SEQ ID NO: 699 - RNA, 19 nt, Artificial Sequence
  source: /note="Description of Artificial Sequence: Synthetic oligonucleotide"
uaaacaacaaguaccuuua

SEQ ID NO: 700 - RNA, 19 nt, Artificial Sequence
  source: /note="Description of Artificial Sequence: Synthetic oligonucleotide"
caaguaccuuuauauugcu

SEQ ID NO: 701 - RNA, 19 nt, Artificial Sequence
  source: /note="Description of Artificial Sequence: Synthetic oligonucleotide"
uauugcuguaacagucaua

SEQ ID NO: 702 - RNA, 19 nt, Artificial Sequence
  source: /note="Description of Artificial Sequence: Synthetic oligonucleotide"
aacagucauagagucuaca

SEQ ID NO: 703 - RNA, 19 nt, Artificial Sequence
  source: /note="Description of Artificial Sequence: Synthetic oligonucleotide"
agagucuacagguggauuu

SEQ ID NO: 704 - RNA, 19 nt, Artificial Sequence
  source: /note="Description of Artificial Sequence: Synthetic oligonucleotide"
ggauuuucugaagaggcag

SEQ ID NO: 705 - RNA, 19 nt, Artificial Sequence
  source: /note="Description of Artificial Sequence: Synthetic oligonucleotide"
gaagaggcagaaauaccug

SEQ ID NO: 706 - RNA, 19 nt, Artificial Sequence
  source: /note="Description of Artificial Sequence: Synthetic oligonucleotide"
agaaauaccuggcaucaaa

SEQ ID NO: 707 - RNA, 19 nt, Artificial Sequence
  source: /note="Description of Artificial Sequence: Synthetic oligonucleotide"
gcaucaaauauguccucuc

SEQ ID NO: 708 - RNA, 19 nt, Artificial Sequence
  source: /note="Description of Artificial Sequence: Synthetic oligonucleotide"
uguccucucucccuacaaa

SEQ ID NO: 709 - RNA, 19 nt, Artificial Sequence
  source: /note="Description of Artificial Sequence: Synthetic oligonucleotide"
gaauuugguugcuacuccu

SEQ ID NO: 710 - RNA, 19 nt, Artificial Sequence
  source: /note="Description of Artificial Sequence: Synthetic oligonucleotide"
gcuacuccucuuuuccuga

SEQ ID NO: 711 - RNA, 19 nt, Artificial Sequence
  source: /note="Description of Artificial Sequence: Synthetic oligonucleotide"
cucuuuuccugaagccugg

SEQ ID NO: 712 - RNA, 19 nt, Artificial Sequence
  source: /note="Description of Artificial Sequence: Synthetic oligonucleotide"
ccugggauuccauauccca

SEQ ID NO: 713 - RNA, 19 nt, Artificial Sequence
  source: /note="Description of Artificial Sequence: Synthetic oligonucleotide"
cauaucccaucaaggugca

SEQ ID NO: 714 - RNA, 19 nt, Artificial Sequence
  source: /note="Description of Artificial Sequence: Synthetic oligonucleotide"
ccaucaaggugcagguuaa

SEQ ID NO: 715 - RNA, 19 nt, Artificial Sequence
  source: /note="Description of Artificial Sequence: Synthetic oligonucleotide"
cagguuaaagauucgcuug

SEQ ID NO: 716 - RNA, 19 nt, Artificial Sequence
  source: /note="Description of Artificial Sequence: Synthetic oligonucleotide"
uucgcuugaccaguuggua

SEQ ID NO: 717 - RNA, 19 nt, Artificial Sequence
  source: /note="Description of Artificial Sequence: Synthetic oligonucleotide"
ccaguugguaggaggaguc

SEQ ID NO: 718 - RNA, 19 nt, Artificial Sequence
  source: /note="Description of Artificial Sequence: Synthetic oligonucleotide"
ggaggagucccaguaacac

SEQ ID NO: 719 - RNA, 19 nt, Artificial Sequence
  source: /note="Description of Artificial Sequence: Synthetic oligonucleotide"
caguaacacugaaugcaca

SEQ ID NO: 720 - RNA, 19 nt, Artificial Sequence
  source: /note="Description of Artificial Sequence: Synthetic oligonucleotide"
gaaugcacaaacaauugau

SEQ ID NO: 721 - RNA, 19 nt, Artificial Sequence
  source: /note="Description of Artificial Sequence: Synthetic oligonucleotide"
aacaauugauguaaaccaa

SEQ ID NO: 722 - RNA, 19 nt, Artificial Sequence
  source: /note="Description of Artificial Sequence: Synthetic oligonucleotide"
uaaaccaagagacaucuga

SEQ ID NO: 723 - RNA, 19 nt, Artificial Sequence
  source: /note="Description of Artificial Sequence: Synthetic oligonucleotide"
caucugacuuggauccaag

SEQ ID NO: 724 - RNA, 19 nt, Artificial Sequence
  source: /note="Description of Artificial Sequence: Synthetic oligonucleotide"
gauccaagcaaaaguguaa

SEQ ID NO: 725 - RNA, 19 nt, Artificial Sequence
  source: /note="Description of Artificial Sequence: Synthetic oligonucleotide"
caaaaguguaacacguguu

SEQ ID NO: 726 - RNA, 19 nt, Artificial Sequence
  source: /note="Description of Artificial Sequence: Synthetic oligonucleotide"
aacacguguugaugaugga

SEQ ID NO: 727 - RNA, 19 nt, Artificial Sequence
  source: /note="Description of Artificial Sequence: Synthetic oligonucleotide"
ugauggaguagcuuccuuu

SEQ ID NO: 728 - RNA, 19 nt, Artificial Sequence
  source: /note="Description of Artificial Sequence: Synthetic oligonucleotide"
guagcuuccuuugugcuua

SEQ ID NO: 729 - RNA, 19 nt, Artificial Sequence
  source: /note="Description of Artificial Sequence: Synthetic oligonucleotide"
gcuuaaucucccaucugga

SEQ ID NO: 730 - RNA, 19 nt, Artificial Sequence
  source: /note="Description of Artificial Sequence: Synthetic oligonucleotide"
ccaucuggagugacggugc

SEQ ID NO: 731 - RNA, 19 nt, Artificial Sequence
  source: /note="Description of Artificial Sequence: Synthetic oligonucleotide"
ugacggugcuggaguuuaa

SEQ ID NO: 732 - RNA, 19 nt, Artificial Sequence
  source: /note="Description of Artificial Sequence: Synthetic oligonucleotide"
gcuggaguuuaaugucaaa

SEQ ID NO: 733 - RNA, 19 nt, Artificial Sequence
  source: /note="Description of Artificial Sequence: Synthetic oligonucleotide"
ugucaaaacugaugcucca

SEQ ID NO: 734 - RNA, 19 nt, Artificial Sequence
  source: /note="Description of Artificial Sequence: Synthetic oligonucleotide"
gaugcuccagaucuuccag

SEQ ID NO: 735 - RNA, 19 nt, Artificial Sequence
  source: /note="Description of Artificial Sequence: Synthetic oligonucleotide"
cagaucuuccagaagaaaa

SEQ ID NO: 736 - RNA, 19 nt, Artificial Sequence
  source: /note="Description of Artificial Sequence: Synthetic oligonucleotide"
agaaaaucaggccagggaa

SEQ ID NO: 737 - RNA, 19 nt, Artificial Sequence
  source: /note="Description of Artificial Sequence: Synthetic oligonucleotide"
ggccagggaagguuaccga

SEQ ID NO: 738 - RNA, 19 nt, Artificial Sequence
  source: /note="Description of Artificial Sequence: Synthetic oligonucleotide"
guuaccgagcaauagcaua

SEQ ID NO: 739 - RNA, 19 nt, Artificial Sequence
  source: /note="Description of Artificial Sequence: Synthetic oligonucleotide"
auagcauacucaucucuca

SEQ ID NO: 740 - RNA, 19 nt, Artificial Sequence
  source: /note="Description of Artificial Sequence: Synthetic oligonucleotide"
uacucaucucucagccaaa

SEQ ID NO: 741 - RNA, 19 nt, Artificial Sequence
  source: /note="Description of Artificial Sequence: Synthetic oligonucleotide"
gccaaaguuaccuuuauau

SEQ ID NO: 742 - RNA, 19 nt, Artificial Sequence
  source: /note="Description of Artificial Sequence: Synthetic oligonucleotide"
ccuuuauauugauuggacu

SEQ ID NO: 743 - RNA, 19 nt, Artificial Sequence
  source: /note="Description of Artificial Sequence: Synthetic oligonucleotide"
gauuggacugauaaccaua

SEQ ID NO: 744 - RNA, 19 nt, Artificial Sequence
  source: /note="Description of Artificial Sequence: Synthetic oligonucleotide"
cugauaaccauaaggcuuu

SEQ ID NO: 745 - RNA, 19 nt, Artificial Sequence
  source: /note="Description of Artificial Sequence: Synthetic oligonucleotide"
aggcuuugcuagugggaga

SEQ ID NO: 746 - RNA, 19 nt, Artificial Sequence
  source: /note="Description of Artificial Sequence: Synthetic oligonucleotide"
gugggagaacaucugaaua

SEQ ID NO: 747 - RNA, 19 nt, Artificial Sequence
  source: /note="Description of Artificial Sequence: Synthetic oligonucleotide"
caucugaauauuauuguua

SEQ ID NO: 748 - RNA, 19 nt, Artificial Sequence
  source: /note="Description of Artificial Sequence: Synthetic oligonucleotide"
uauuauuguuacccccaaa

SEQ ID NO: 749 - RNA, 19 nt, Artificial Sequence
  source: /note="Description of Artificial Sequence: Synthetic oligonucleotide"
cccaaaagcccauauauug

SEQ ID NO: 750 - RNA, 19 nt, Artificial Sequence
  source: /note="Description of Artificial Sequence: Synthetic oligonucleotide"
ccaaaagcccauauauuga

SEQ ID NO: 751 - RNA, 19 nt, Artificial Sequence
  source: /note="Description of Artificial Sequence: Synthetic oligonucleotide"
caaaagcccauauauugac

SEQ ID NO: 752 - RNA, 19 nt, Artificial Sequence
  source: /note="Description of Artificial Sequence: Synthetic oligonucleotide"
aaaagcccauauauugaca

SEQ ID NO: 753 - RNA, 19 nt, Artificial Sequence
  source: /note="Description of Artificial Sequence: Synthetic oligonucleotide"
aaagcccauauauugacaa

SEQ ID NO: 754 - RNA, 19 nt, Artificial Sequence
  source: /note="Description of Artificial Sequence: Synthetic oligonucleotide"
aagcccauauauugacaaa

SEQ ID NO: 755 - RNA, 19 nt, Artificial Sequence
  source: /note="Description of Artificial Sequence: Synthetic oligonucleotide"
agcccauauauugacaaaa

SEQ ID NO: 756 - RNA, 19 nt, Artificial Sequence
  source: /note="Description of Artificial Sequence: Synthetic oligonucleotide"
gcccauauauugacaaaau

SEQ ID NO: 757 - RNA, 19 nt, Artificial Sequence
  source: /note="Description of Artificial Sequence: Synthetic oligonucleotide"
cccauauauugacaaaaua

SEQ ID NO: 758 - RNA, 19 nt, Artificial Sequence
  source: /note="Description of Artificial Sequence: Synthetic oligonucleotide"
ccauauauugacaaaauaa

SEQ ID NO: 759 - RNA, 19 nt, Artificial Sequence
  source: /note="Description of Artificial Sequence: Synthetic oligonucleotide"
cauauauugacaaaauaac

SEQ ID NO: 760 - RNA, 19 nt, Artificial Sequence
  source: /note="Description of Artificial Sequence: Synthetic oligonucleotide"
auauauugacaaaauaacu

SEQ ID NO: 761 - RNA, 19 nt, Artificial Sequence
  source: /note="Description of Artificial Sequence: Synthetic oligonucleotide"
uauauugacaaaauaacuc

SEQ ID NO: 762 - RNA, 19 nt, Artificial Sequence
  source: /note="Description of Artificial Sequence: Synthetic oligonucleotide"
auauugacaaaauaacuca

SEQ ID NO: 763 - RNA, 19 nt, Artificial Sequence
  source: /note="Description of Artificial Sequence: Synthetic oligonucleotide"
uauugacaaaauaacucac

SEQ ID NO: 764 - RNA, 19 nt, Artificial Sequence
  source: /note="Description of Artificial Sequence: Synthetic oligonucleotide"
auugacaaaauaacucacu

SEQ ID NO: 765 - RNA, 19 nt, Artificial Sequence
  source: /note="Description of Artificial Sequence: Synthetic oligonucleotide"
uugacaaaauaacucacua

SEQ ID NO: 766 - RNA, 19 nt, Artificial Sequence
  source: /note="Description of Artificial Sequence: Synthetic oligonucleotide"
ugacaaaauaacucacuau

SEQ ID NO: 767 - RNA, 19 nt, Artificial Sequence
  source: /note="Description of Artificial Sequence: Synthetic oligonucleotide"
gacaaaauaacucacuaua

SEQ ID NO: 768 - RNA, 19 nt, Artificial Sequence
  source: /note="Description of Artificial Sequence: Synthetic oligonucleotide"
aaaauaacucacuauaauu

SEQ ID NO: 769 - RNA, 19 nt, Artificial Sequence
  source: /note="Description of Artificial Sequence: Synthetic oligonucleotide"
aaauaacucacuauaauua

SEQ ID NO: 770 - RNA, 19 nt, Artificial Sequence
  source: /note="Description of Artificial Sequence: Synthetic oligonucleotide"
aauaacucacuauaauuac

SEQ ID NO: 771 - RNA, 19 nt, Artificial Sequence
  source: /note="Description of Artificial Sequence: Synthetic oligonucleotide"
auaacucacuauaauuacu

SEQ ID NO: 772 - RNA, 19 nt, Artificial Sequence
  source: /note="Description of Artificial Sequence: Synthetic oligonucleotide"
aacucacuauaauuacuug

SEQ ID NO: 773 - RNA, 19 nt, Artificial Sequence
  source: /note="Description of Artificial Sequence: Synthetic oligonucleotide"
acucacuauaauuacuuga

SEQ ID NO: 774 - RNA, 19 nt, Artificial Sequence
  source: /note="Description of Artificial Sequence: Synthetic oligonucleotide"
cucacuauaauuacuugau

SEQ ID NO: 775 - RNA, 19 nt, Artificial Sequence
  source: /note="Description of Artificial Sequence: Synthetic oligonucleotide"
ucacuauaauuacuugauu

SEQ ID NO: 776 - RNA, 19 nt, Artificial Sequence
  source: /note="Description of Artificial Sequence: Synthetic oligonucleotide"
acuauaauuacuugauuuu

SEQ ID NO: 777 - RNA, 19 nt, Artificial Sequence
  source: /note="Description of Artificial Sequence: Synthetic oligonucleotide"
cuauaauuacuugauuuua

SEQ ID NO: 778 - RNA, 19 nt, Artificial Sequence
  source: /note="Description of Artificial Sequence: Synthetic oligonucleotide"
uauaauuacuugauuuuau

SEQ ID NO: 779 - RNA, 19 nt, Artificial Sequence
  source: /note="Description of Artificial Sequence: Synthetic oligonucleotide"
auaauuacuugauuuuauc

SEQ ID NO: 780 - RNA, 19 nt, Artificial Sequence
  source: /note="Description of Artificial Sequence: Synthetic oligonucleotide"
uaauuacuugauuuuaucc

SEQ ID NO: 781 - RNA, 19 nt, Artificial Sequence
  source: /note="Description of Artificial Sequence: Synthetic oligonucleotide"
aauuacuugauuuuaucca

SEQ ID NO: 782 - RNA, 19 nt, Artificial Sequence
  source: /note="Description of Artificial Sequence: Synthetic oligonucleotide"
auuacuugauuuuauccaa

SEQ ID NO: 783 - RNA, 19 nt, Artificial Sequence
  source: /note="Description of Artificial Sequence: Synthetic oligonucleotide"
uuauccaagggcaaaauua

SEQ ID NO: 784 - RNA, 19 nt, Artificial Sequence
  source: /note="Description of Artificial Sequence: Synthetic oligonucleotide"
gcaaaauuauccacuuugg

SEQ ID NO: 785 - RNA, 19 nt, Artificial Sequence
  source: /note="Description of Artificial Sequence: Synthetic oligonucleotide"
cacuuuggcacgagggaga

SEQ ID NO: 786 - RNA, 19 nt, Artificial Sequence
  source: /note="Description of Artificial Sequence: Synthetic oligonucleotide"
cgagggagaaauuuucaga

SEQ ID NO: 787 - RNA, 19 nt, Artificial Sequence
  source: /note="Description of Artificial Sequence: Synthetic oligonucleotide"
auuuucagaugcaucuuau

SEQ ID NO: 788 - RNA, 19 nt, Artificial Sequence
  source: /note="Description of Artificial Sequence: Synthetic oligonucleotide"
gcaucuuaucaaaguauaa

SEQ ID NO: 789 - RNA, 19 nt, Artificial Sequence
  source: /note="Description of Artificial Sequence: Synthetic oligonucleotide"
caaaguauaaacauuccag

SEQ ID NO: 790 - RNA, 19 nt, Artificial Sequence
  source: /note="Description of Artificial Sequence: Synthetic oligonucleotide"
auuccaguaacacagaaca

SEQ ID NO: 791 - RNA, 19 nt, Artificial Sequence
  source: /note="Description of Artificial Sequence: Synthetic oligonucleotide"
cacagaacaugguuccuuc

SEQ ID NO: 792 - RNA, 19 nt, Artificial Sequence
  source: /note="Description of Artificial Sequence: Synthetic oligonucleotide"
gguuccuucaucccgacuu

SEQ ID NO: 793 - RNA, 19 nt, Artificial Sequence
  source: /note="Description of Artificial Sequence: Synthetic oligonucleotide"
cccgacuucuggucuauua

SEQ ID NO: 794 - RNA, 19 nt, Artificial Sequence
  source: /note="Description of Artificial Sequence: Synthetic oligonucleotide"
ggucuauuacaucgucaca

SEQ ID NO: 795 - RNA, 19 nt, Artificial Sequence
  source: /note="Description of Artificial Sequence: Synthetic oligonucleotide"
aucgucacaggagaacaga

SEQ ID NO: 796 - RNA, 19 nt, Artificial Sequence
  source: /note="Description of Artificial Sequence: Synthetic oligonucleotide"
caggagaacagacagcaga

SEQ ID NO: 797 - RNA, 19 nt, Artificial Sequence
  source: /note="Description of Artificial Sequence: Synthetic oligonucleotide"
cagcagaauuagugucuga

SEQ ID NO: 798 - RNA, 19 nt, Artificial Sequence
  source: /note="Description of Artificial Sequence: Synthetic oligonucleotide"
gugucugauucagucuggu

SEQ ID NO: 799 - RNA, 19 nt, Artificial Sequence
  source: /note="Description of Artificial Sequence: Synthetic oligonucleotide"
cagucugguuaaauauuga

SEQ ID NO: 800 - RNA, 19 nt, Artificial Sequence
  source: /note="Description of Artificial Sequence: Synthetic oligonucleotide"
guuaaauauugaagaaaaa

SEQ ID NO: 801 - RNA, 19 nt, Artificial Sequence
  source: /note="Description of Artificial Sequence: Synthetic oligonucleotide"
agaaaaauguggcaaccag

SEQ ID NO: 802 - RNA, 19 nt, Artificial Sequence
  source: /note="Description of Artificial Sequence: Synthetic oligonucleotide"
gcaaccagcuccagguuca

SEQ ID NO: 803 - RNA, 19 nt, Artificial Sequence
  source: /note="Description of Artificial Sequence: Synthetic oligonucleotide"
gcuccagguucaucugucu

SEQ ID NO: 804 - RNA, 19 nt, Artificial Sequence
  source: /note="Description of Artificial Sequence: Synthetic oligonucleotide"
aucugucuccugaugcaga

SEQ ID NO: 805 - RNA, 19 nt, Artificial Sequence
  source: /note="Description of Artificial Sequence: Synthetic oligonucleotide"
gaugcagaugcauauucuc

SEQ ID NO: 806 - RNA, 19 nt, Artificial Sequence
  source: /note="Description of Artificial Sequence: Synthetic oligonucleotide"
gcauauucuccaggccaaa

SEQ ID NO: 807 - RNA, 19 nt, Artificial Sequence
  source: /note="Description of Artificial Sequence: Synthetic oligonucleotide"
aggccaaacugugucucuu

SEQ ID NO: 808 - RNA, 19 nt, Artificial Sequence
  source: /note="Description of Artificial Sequence: Synthetic oligonucleotide"
gugucucuuaauauggcaa

SEQ ID NO: 809 - RNA, 19 nt, Artificial Sequence
  source: /note="Description of Artificial Sequence: Synthetic oligonucleotide"
uuaauauggcaacuggaau

SEQ ID NO: 810 - RNA, 19 nt, Artificial Sequence
  source: /note="Description of Artificial Sequence: Synthetic oligonucleotide"
aacuggaauggauuccugg

SEQ ID NO: 811 - RNA, 19 nt, Artificial Sequence
  source: /note="Description of Artificial Sequence: Synthetic oligonucleotide"
uuccuggguggcauuagca

SEQ ID NO: 812 - RNA, 19 nt, Artificial Sequence
  source: /note="Description of Artificial Sequence: Synthetic oligonucleotide"
ggcauuagcagcaguggac

SEQ ID NO: 813 - RNA, 19 nt, Artificial Sequence
  source: /note="Description of Artificial Sequence: Synthetic oligonucleotide"
aguggacagugcuguguau

SEQ ID NO: 814 - RNA, 19 nt, Artificial Sequence
  source: /note="Description of Artificial Sequence: Synthetic oligonucleotide"
gcuguguauggaguccaaa

SEQ ID NO: 815 - RNA, 19 nt, Artificial Sequence
  source: /note="Description of Artificial Sequence: Synthetic oligonucleotide"
aguccaaagaggagccaaa

SEQ ID NO: 816 - RNA, 19 nt, Artificial Sequence
  source: /note="Description of Artificial Sequence: Synthetic oligonucleotide"
agaggagccaaaaagcccu

SEQ ID NO: 817 - RNA, 19 nt, Artificial Sequence
  source: /note="Description of Artificial Sequence: Synthetic oligonucleotide"
agcccuuggaaagaguauu

SEQ ID NO: 818 - RNA, 19 nt, Artificial Sequence
  source: /note="Description of Artificial Sequence: Synthetic oligonucleotide"
aagaguauuucaauucuua

SEQ ID NO: 819 - RNA, 19 nt, Artificial Sequence
  source: /note="Description of Artificial Sequence: Synthetic oligonucleotide"
uuucaauucuuagagaaga

SEQ ID NO: 820 - RNA, 19 nt, Artificial Sequence
  source: /note="Description of Artificial Sequence: Synthetic oligonucleotide"
gagaagagugaucugggcu

SEQ ID NO: 821 - RNA, 19 nt, Artificial Sequence
  source: /note="Description of Artificial Sequence: Synthetic oligonucleotide"
ugaucugggcuguggggca

SEQ ID NO: 822 - RNA, 19 nt, Artificial Sequence
  source: /note="Description of Artificial Sequence: Synthetic oligonucleotide"
ggggcaggugguggccuca

SEQ ID NO: 823 - RNA, 19 nt, Artificial Sequence
  source: /note="Description of Artificial Sequence: Synthetic oligonucleotide"
guggccucaacaaugccaa

SEQ ID NO: 824 - RNA, 19 nt, Artificial Sequence
  source: /note="Description of Artificial Sequence: Synthetic oligonucleotide"
caacaaugccaauguguuc

SEQ ID NO: 825 - RNA, 19 nt, Artificial Sequence
  source: /note="Description of Artificial Sequence: Synthetic oligonucleotide"
caauguguuccaccuagcu

SEQ ID NO: 826 - RNA, 19 nt, Artificial Sequence
  source: /note="Description of Artificial Sequence: Synthetic oligonucleotide"
caccuagcuggacuuaccu

SEQ ID NO: 827 - RNA, 19 nt, Artificial Sequence
  source: /note="Description of Artificial Sequence: Synthetic oligonucleotide"
gacuuaccuuccucacuaa

SEQ ID NO: 828 - RNA, 19 nt, Artificial Sequence
  source: /note="Description of Artificial Sequence: Synthetic oligonucleotide"
ucacuaaugcaaaugcaga

SEQ ID NO: 829 - RNA, 19 nt, Artificial Sequence
  source: /note="Description of Artificial Sequence: Synthetic oligonucleotide"
aaaugcagaugacucccaa

SEQ ID NO: 830 - RNA, 19 nt, Artificial Sequence
  source: /note="Description of Artificial Sequence: Synthetic oligonucleotide"
cucccaagaaaaugaugaa

SEQ ID NO: 831 - RNA, 19 nt, Artificial Sequence
  source: /note="Description of Artificial Sequence: Synthetic oligonucleotide"
ccuuguaaagaaauucuca

SEQ ID NO: 832 - RNA, 19 nt, Artificial Sequence
  source: /note="Description of Artificial Sequence: Synthetic oligonucleotide"
aauucucaggccaagaaga

SEQ ID NO: 833 - RNA, 19 nt, Artificial Sequence
  source: /note="Description of Artificial Sequence: Synthetic oligonucleotide"
ccaagaagaacgcugcaaa

SEQ ID NO: 834 - RNA, 19 nt, Artificial Sequence
  source: /note="Description of Artificial Sequence: Synthetic oligonucleotide"
cgcugcaaaagaagauaga

SEQ ID NO: 835 - RNA, 19 nt, Artificial Sequence
  source: /note="Description of Artificial Sequence: Synthetic oligonucleotide"
aaagaagauagaagaaaua

SEQ ID NO: 836 - RNA, 19 nt, Artificial Sequence
  source: /note="Description of Artificial Sequence: Synthetic oligonucleotide"
agaaauagcugcuaaauau

SEQ ID NO: 837 - RNA, 19 nt, Artificial Sequence
  source: /note="Description of Artificial Sequence: Synthetic oligonucleotide"
gcugcuaaauauaaacauu

SEQ ID NO: 838 - RNA, 19 nt, Artificial Sequence
  source: /note="Description of Artificial Sequence: Synthetic oligonucleotide"
acauucaguagugaagaaa

SEQ ID NO: 839 - RNA, 19 nt, Artificial Sequence
  source: /note="Description of Artificial Sequence: Synthetic oligonucleotide"
guagugaagaaauguuguu

SEQ ID NO: 840 - RNA, 19 nt, Artificial Sequence
  source: /note="Description of Artificial Sequence: Synthetic oligonucleotide"
aaauguuguuacgauggag

SEQ ID NO: 841 - RNA, 19 nt, Artificial Sequence
  source: /note="Description of Artificial Sequence: Synthetic oligonucleotide"
cgauggagccugcguuaau

SEQ ID NO: 842 - RNA, 19 nt, Artificial Sequence
  source: /note="Description of Artificial Sequence: Synthetic oligonucleotide"
cguuaauaaugaugaaacc

SEQ ID NO: 843 - RNA, 19 nt, Artificial Sequence
  source: /note="Description of Artificial Sequence: Synthetic oligonucleotide"
augaugaaaccugugagca

SEQ ID NO: 844 - RNA, 19 nt, Artificial Sequence
  source: /note="Description of Artificial Sequence: Synthetic oligonucleotide"
cugugagcagcgagcugca

SEQ ID NO: 845 - RNA, 19 nt, Artificial Sequence
  source: /note="Description of Artificial Sequence: Synthetic oligonucleotide"
cgagcugcacggauuaguu

SEQ ID NO: 846 - RNA, 19 nt, Artificial Sequence
  source: /note="Description of Artificial Sequence: Synthetic oligonucleotide"
ggauuaguuuagggccaag

SEQ ID NO: 847 - RNA, 19 nt, Artificial Sequence
  source: /note="Description of Artificial Sequence: Synthetic oligonucleotide"
gggccaagaugcaucaaag

SEQ ID NO: 848 - RNA, 19 nt, Artificial Sequence
  source: /note="Description of Artificial Sequence: Synthetic oligonucleotide"
caucaaagcuuucacugaa

SEQ ID NO: 849 - RNA, 19 nt, Artificial Sequence
  source: /note="Description of Artificial Sequence: Synthetic oligonucleotide"
gcuuucacugaauguugug

SEQ ID NO: 850 - RNA, 19 nt, Artificial Sequence
  source: /note="Description of Artificial Sequence: Synthetic oligonucleotide"
aauguugugucgucgcaag

SEQ ID NO: 851 - RNA, 19 nt, Artificial Sequence
  source: /note="Description of Artificial Sequence: Synthetic oligonucleotide"
cgucgcaagccagcuccgu

SEQ ID NO: 852 - RNA, 19 nt, Artificial Sequence
  source: /note="Description of Artificial Sequence: Synthetic oligonucleotide"
gcuccgugcuaauaucucu

SEQ ID NO: 853 - RNA, 19 nt, Artificial Sequence
  source: /note="Description of Artificial Sequence: Synthetic oligonucleotide"
cuaauaucucucauaaaga

SEQ ID NO: 854 - RNA, 19 nt, Artificial Sequence
  source: /note="Description of Artificial Sequence: Synthetic oligonucleotide"
aaagacaugcaauugggaa

SEQ ID NO: 855 - RNA, 19 nt, Artificial Sequence
  source: /note="Description of Artificial Sequence: Synthetic oligonucleotide"
caauugggaaggcuacaca

SEQ ID NO: 856 - RNA, 19 nt, Artificial Sequence
  source: /note="Description of Artificial Sequence: Synthetic oligonucleotide"
gcuacacaugaagacccug

SEQ ID NO: 857 - RNA, 19 nt, Artificial Sequence
  source: /note="Description of Artificial Sequence: Synthetic oligonucleotide"
caugaagacccuguuacca

SEQ ID NO: 858 - RNA, 19 nt, Artificial Sequence
  source: /note="Description of Artificial Sequence: Synthetic oligonucleotide"
uaccaguaagcaagccaga

SEQ ID NO: 859 - RNA, 19 nt, Artificial Sequence
  source: /note="Description of Artificial Sequence: Synthetic oligonucleotide"
agcaagccagaaauucgga

SEQ ID NO: 860 - RNA, 19 nt, Artificial Sequence
  source: /note="Description of Artificial Sequence: Synthetic oligonucleotide"
agaaauucggaguuauuuu

SEQ ID NO: 861 - RNA, 19 nt, Artificial Sequence
  source: /note="Description of Artificial Sequence: Synthetic oligonucleotide"
aguuauuuuccagaaagcu

SEQ ID NO: 862 - RNA, 19 nt, Artificial Sequence
  source: /note="Description of Artificial Sequence: Synthetic oligonucleotide"
cagaaagcugguuguggga

SEQ ID NO: 863 - RNA, 19 nt, Artificial Sequence
  source: /note="Description of Artificial Sequence: Synthetic oligonucleotide"
gugggaaguucaucuuguu

SEQ ID NO: 864 - RNA, 19 nt, Artificial Sequence
  source: /note="Description of Artificial Sequence: Synthetic oligonucleotide"
ucaucuuguucccagaaga

SEQ ID NO: 865 - RNA, 19 nt, Artificial Sequence
  source: /note="Description of Artificial Sequence: Synthetic oligonucleotide"
ccagaagaaaacaguugca

SEQ ID NO: 866 - RNA, 19 nt, Artificial Sequence
  source: /note="Description of Artificial Sequence: Synthetic oligonucleotide"
caguugcaguuugcccuac

SEQ ID NO: 867 - RNA, 19 nt, Artificial Sequence
  source: /note="Description of Artificial Sequence: Synthetic oligonucleotide"
caguuugcccuaccugauu

SEQ ID NO: 868 - RNA, 19 nt, Artificial Sequence
  source: /note="Description of Artificial Sequence: Synthetic oligonucleotide"
ccugauucucuaaccaccu

SEQ ID NO: 869 - RNA, 19 nt, Artificial Sequence
  source: /note="Description of Artificial Sequence: Synthetic oligonucleotide"
accaccugggaaauucaag

SEQ ID NO: 870 - RNA, 19 nt, Artificial Sequence
  source: /note="Description of Artificial Sequence: Synthetic oligonucleotide"
gaaauucaaggcguuggca

SEQ ID NO: 871 - RNA, 19 nt, Artificial Sequence
  source: /note="Description of Artificial Sequence: Synthetic oligonucleotide"
cguuggcauuucaaacacu

SEQ ID NO: 872 - RNA, 19 nt, Artificial Sequence
  source: /note="Description of Artificial Sequence: Synthetic oligonucleotide"
cauuucaaacacugguaua

SEQ ID NO: 873 - RNA, 19 nt, Artificial Sequence
  source: /note="Description of Artificial Sequence: Synthetic oligonucleotide"
guauauguguugcugauac

SEQ ID NO: 874 - RNA, 19 nt, Artificial Sequence
  source: /note="Description of Artificial Sequence: Synthetic oligonucleotide"
ugcugauacugucaaggca

SEQ ID NO: 875 - RNA, 19 nt, Artificial Sequence
  source: /note="Description of Artificial Sequence: Synthetic oligonucleotide"
cugucaaggcaaagguguu

SEQ ID NO: 876 - RNA, 19 nt, Artificial Sequence
  source: /note="Description of Artificial Sequence: Synthetic oligonucleotide"
agguguucaaagaugucuu

SEQ ID NO: 877 - RNA, 19 nt, Artificial Sequence
  source: /note="Description of Artificial Sequence: Synthetic oligonucleotide"
caaagaugucuuccuggaa

SEQ ID NO: 878 - RNA, 19 nt, Artificial Sequence
  source: /note="Description of Artificial Sequence: Synthetic oligonucleotide"
cuuccuggaaaugaauaua

SEQ ID NO: 879 - RNA, 19 nt, Artificial Sequence
  source: /note="Description of Artificial Sequence: Synthetic oligonucleotide"
gaauauaccauauucuguu

SEQ ID NO: 880 - RNA, 19 nt, Artificial Sequence
  source: /note="Description of Artificial Sequence: Synthetic oligonucleotide"
auauucuguuguacgagga

SEQ ID NO: 881 - RNA, 19 nt, Artificial Sequence
  source: /note="Description of Artificial Sequence: Synthetic oligonucleotide"
cgaggagaacagauccaau

SEQ ID NO: 882 - RNA, 19 nt, Artificial Sequence
  source: /note="Description of Artificial Sequence: Synthetic oligonucleotide"
gaacagauccaauugaaag

SEQ ID NO: 883 - RNA, 19 nt, Artificial Sequence
  source: /note="Description of Artificial Sequence: Synthetic oligonucleotide"
gaaaggaacuguuuacaac

SEQ ID NO: 884 - RNA, 19 nt, Artificial Sequence
  source: /note="Description of Artificial Sequence: Synthetic oligonucleotide"
acuguuuacaacuauagga

SEQ ID NO: 885 - RNA, 19 nt, Artificial Sequence
  source: /note="Description of Artificial Sequence: Synthetic oligonucleotide"
aacuauaggacuucuggga

SEQ ID NO: 886 - RNA, 19 nt, Artificial Sequence
  source: /note="Description of Artificial Sequence: Synthetic oligonucleotide"
ugggaugcaguucuguguu

SEQ ID NO: 887 - RNA, 19 nt, Artificial Sequence
  source: /note="Description of Artificial Sequence: Synthetic oligonucleotide"
guucuguguuaaaaugucu

SEQ ID NO: 888 - RNA, 19 nt, Artificial Sequence
  source: /note="Description of Artificial Sequence: Synthetic oligonucleotide"
uuaaaaugucugcugugga

SEQ ID NO: 889 - RNA, 19 nt, Artificial Sequence
  source: /note="Description of Artificial Sequence: Synthetic oligonucleotide"
cuguggagggaaucugcac

SEQ ID NO: 890 - RNA, 19 nt, Artificial Sequence
  source: /note="Description of Artificial Sequence: Synthetic oligonucleotide"
ggaaucugcacuucggaaa

SEQ ID NO: 891 - RNA, 19 nt, Artificial Sequence
  source: /note="Description of Artificial Sequence: Synthetic oligonucleotide"
cggaaagcccagucauuga

SEQ ID NO: 892 - RNA, 19 nt, Artificial Sequence
  source: /note="Description of Artificial Sequence: Synthetic oligonucleotide"
ccagucauugaucaucagg

SEQ ID NO: 893 - RNA, 19 nt, Artificial Sequence
  source: /note="Description of Artificial Sequence: Synthetic oligonucleotide"
caucagggcacaaaguccu

SEQ ID NO: 894 - RNA, 19 nt, Artificial Sequence
  source: /note="Description of Artificial Sequence: Synthetic oligonucleotide"
ggcacaaaguccuccaaau

SEQ ID NO: 895 - RNA, 19 nt, Artificial Sequence
  source: /note="Description of Artificial Sequence: Synthetic oligonucleotide"
caaaugugugcgccagaaa

SEQ ID NO: 896 - RNA, 19 nt, Artificial Sequence
  source: /note="Description of Artificial Sequence: Synthetic oligonucleotide"
gcgccagaaaguagagggc

SEQ ID NO: 897 - RNA, 19 nt, Artificial Sequence
  source: /note="Description of Artificial Sequence: Synthetic oligonucleotide"
aguagagggcuccuccagu

SEQ ID NO: 898 - RNA, 19 nt, Artificial Sequence
  source: /note="Description of Artificial Sequence: Synthetic oligonucleotide"
ccuccagucacuuggugac

SEQ ID NO: 899 - RNA, 19 nt, Artificial Sequence
  source: /note="Description of Artificial Sequence: Synthetic oligonucleotide"
ucacuuggugacauucacu

SEQ ID NO: 900 - RNA, 19 nt, Artificial Sequence
  source: /note="Description of Artificial Sequence: Synthetic oligonucleotide"
cauucacugugcuuccucu

SEQ ID NO: 901 - RNA, 19 nt, Artificial Sequence
  source: /note="Description of Artificial Sequence: Synthetic oligonucleotide"
ggaaauuggccuucacaac

SEQ ID NO: 902 - RNA, 19 nt, Artificial Sequence
  source: /note="Description of Artificial Sequence: Synthetic oligonucleotide"
cuucacaacaucaauuuuu

SEQ ID NO: 903 - RNA, 19 nt, Artificial Sequence
  source: /note="Description of Artificial Sequence: Synthetic oligonucleotide"
aauuuuucacuggagacuu

SEQ ID NO: 904 - RNA, 19 nt, Artificial Sequence
  source: /note="Description of Artificial Sequence: Synthetic oligonucleotide"
cuggagacuugguuuggaa

SEQ ID NO: 905 - RNA, 19 nt, Artificial Sequence
  source: /note="Description of Artificial Sequence: Synthetic oligonucleotide"
gguuuggaaaagaaaucuu

SEQ ID NO: 906 - RNA, 19 nt, Artificial Sequence
  source: /note="Description of Artificial Sequence: Synthetic oligonucleotide"
aaucuuaguaaaaacauua

SEQ ID NO: 907 - RNA, 19 nt, Artificial Sequence
  source: /note="Description of Artificial Sequence: Synthetic oligonucleotide"
aaaaacauuacgaguggug

SEQ ID NO: 908 - RNA, 19 nt, Artificial Sequence
  source: /note="Description of Artificial Sequence: Synthetic oligonucleotide"
gaguggugccagaaggugu

SEQ ID NO: 909 - RNA, 19 nt, Artificial Sequence
  source: /note="Description of Artificial Sequence: Synthetic oligonucleotide"
agaaggugucaaaagggaa

SEQ ID NO: 910 - RNA, 19 nt, Artificial Sequence
  source: /note="Description of Artificial Sequence: Synthetic oligonucleotide"
ugucaaaagggaaagcuau

SEQ ID NO: 911 - RNA, 19 nt, Artificial Sequence
  source: /note="Description of Artificial Sequence: Synthetic oligonucleotide"
gcuauucugguguuacuuu

SEQ ID NO: 912 - RNA, 19 nt, Artificial Sequence
  source: /note="Description of Artificial Sequence: Synthetic oligonucleotide"
guguuacuuuggauccuag

SEQ ID NO: 913 - RNA, 19 nt, Artificial Sequence
  source: /note="Description of Artificial Sequence: Synthetic oligonucleotide"
ggauccuagggguauuuau

SEQ ID NO: 914 - RNA, 19 nt, Artificial Sequence
  source: /note="Description of Artificial Sequence: Synthetic oligonucleotide"
gguauuuaugguaccauua

SEQ ID NO: 915 - RNA, 19 nt, Artificial Sequence
  source: /note="Description of Artificial Sequence: Synthetic oligonucleotide"
guaccauuagcagacgaaa

SEQ ID NO: 916 - RNA, 19 nt, Artificial Sequence
  source: /note="Description of Artificial Sequence: Synthetic oligonucleotide"
cagacgaaaggaguuccca

SEQ ID NO: 917 - RNA, 19 nt, Artificial Sequence
  source: /note="Description of Artificial Sequence: Synthetic oligonucleotide"
aggaguucccauacaggau

SEQ ID NO: 918 - RNA, 19 nt, Artificial Sequence
  source: /note="Description of Artificial Sequence: Synthetic oligonucleotide"
cauacaggauacccuuaga

SEQ ID NO: 919 - RNA, 19 nt, Artificial Sequence
  source: /note="Description of Artificial Sequence: Synthetic oligonucleotide"
cuuagauuugguccccaaa

SEQ ID NO: 920 - RNA, 19 nt, Artificial Sequence
  source: /note="Description of Artificial Sequence: Synthetic oligonucleotide"
uccccaaaacagaaaucaa

SEQ ID NO: 921 - RNA, 19 nt, Artificial Sequence
  source: /note="Description of Artificial Sequence: Synthetic oligonucleotide"
acagaaaucaaaaggauuu

SEQ ID NO: 922 - RNA, 19 nt, Artificial Sequence
  source: /note="Description of Artificial Sequence: Synthetic oligonucleotide"
aaaggauuuugaguguaaa

SEQ ID NO: 923 - RNA, 19 nt, Artificial Sequence
  source: /note="Description of Artificial Sequence: Synthetic oligonucleotide"
aguguaaaaggacugcuug

SEQ ID NO: 924 - RNA, 19 nt, Artificial Sequence
  source: /note="Description of Artificial Sequence: Synthetic oligonucleotide"
aaggacugcuuguagguga

SEQ ID NO: 925 - RNA, 19 nt, Artificial Sequence
  source: /note="Description of Artificial Sequence: Synthetic oligonucleotide"
guaggugagaucuugucug

SEQ ID NO: 926 - RNA, 19 nt, Artificial Sequence
  source: /note="Description of Artificial Sequence: Synthetic oligonucleotide"
aucuugucugcaguucuaa

SEQ ID NO: 927 - RNA, 19 nt, Artificial Sequence
  source: /note="Description of Artificial Sequence: Synthetic oligonucleotide"
guucuaagucaggaaggca

SEQ ID NO: 928 - RNA, 19 nt, Artificial Sequence
  source: /note="Description of Artificial Sequence: Synthetic oligonucleotide"
gaaggcaucaauauccuaa

SEQ ID NO: 929 - RNA, 19 nt, Artificial Sequence
  source: /note="Description of Artificial Sequence: Synthetic oligonucleotide"
ucaauauccuaacccaccu

SEQ ID NO: 930 - RNA, 19 nt, Artificial Sequence
  source: /note="Description of Artificial Sequence: Synthetic oligonucleotide"
ccaccuccccaaagggagu

SEQ ID NO: 931 - RNA, 19 nt, Artificial Sequence
  source: /note="Description of Artificial Sequence: Synthetic oligonucleotide"
ccccaaagggagugcagag

SEQ ID NO: 932 - RNA, 19 nt, Artificial Sequence
  source: /note="Description of Artificial Sequence: Synthetic oligonucleotide"
gugcagaggcggagcugau

SEQ ID NO: 933 - RNA, 19 nt, Artificial Sequence
  source: /note="Description of Artificial Sequence: Synthetic oligonucleotide"
ggagcugaugagcguuguc

SEQ ID NO: 934 - RNA, 19 nt, Artificial Sequence
  source: /note="Description of Artificial Sequence: Synthetic oligonucleotide"
cguugucccaguauucuau

SEQ ID NO: 935 - RNA, 19 nt, Artificial Sequence
  source: /note="Description of Artificial Sequence: Synthetic oligonucleotide"
ccaguauucuauguuuuuc

SEQ ID NO: 936 - RNA, 19 nt, Artificial Sequence
  source: /note="Description of Artificial Sequence: Synthetic oligonucleotide"
guuuuucacuaccuggaaa

SEQ ID NO: 937 - RNA, 19 nt, Artificial Sequence
  source: /note="Description of Artificial Sequence: Synthetic oligonucleotide"
ccuggaaacaggaaaucau

SEQ ID NO: 938 - RNA, 19 nt, Artificial Sequence
  source: /note="Description of Artificial Sequence: Synthetic oligonucleotide"
ggaacauuuuucauucuga

SEQ ID NO: 939 - RNA, 19 nt, Artificial Sequence
  source: /note="Description of Artificial Sequence: Synthetic oligonucleotide"
cauucugacccauuaauug

SEQ ID NO: 940 - RNA, 19 nt, Artificial Sequence
  source: /note="Description of Artificial Sequence: Synthetic oligonucleotide"
ccauuaauugaaaagcaga

SEQ ID NO: 941 - RNA, 19 nt, Artificial Sequence
  source: /note="Description of Artificial Sequence: Synthetic oligonucleotide"
aaagcagaaacugaagaaa

SEQ ID NO: 942 - RNA, 19 nt, Artificial Sequence
  source: /note="Description of Artificial Sequence: Synthetic oligonucleotide"
aacugaagaaaaaauuaaa

SEQ ID NO: 943 - RNA, 19 nt, Artificial Sequence
  source: /note="Description of Artificial Sequence: Synthetic oligonucleotide"
aaaaaauuaaaagaaggga

SEQ ID NO: 944 - RNA, 19 nt, Artificial Sequence
  source: /note="Description of Artificial Sequence: Synthetic oligonucleotide"
agggauguugagcauuaug

SEQ ID NO: 945 - RNA, 19 nt, Artificial Sequence
  source: /note="Description of Artificial Sequence: Synthetic oligonucleotide"
gagcauuauguccuacaga

SEQ ID NO: 946 - RNA, 19 nt, Artificial Sequence
  source: /note="Description of Artificial Sequence: Synthetic oligonucleotide"
uguccuacagaaaugcuga

SEQ ID NO: 947 - RNA, 19 nt, Artificial Sequence
  source: /note="Description of Artificial Sequence: Synthetic oligonucleotide"
aaugcugacuacucuuaca

SEQ ID NO: 948 - RNA, 19 nt, Artificial Sequence
  source: /note="Description of Artificial Sequence: Synthetic oligonucleotide"
uacucuuacagugugugga

SEQ ID NO: 949 - RNA, 19 nt, Artificial Sequence
  source: /note="Description of Artificial Sequence: Synthetic oligonucleotide"
aguguguggaaggguggaa

SEQ ID NO: 950 - RNA, 19 nt, Artificial Sequence
  source: /note="Description of Artificial Sequence: Synthetic oligonucleotide"
ggguggaagugcuagcacu

SEQ ID NO: 951 - RNA, 19 nt, Artificial Sequence
  source: /note="Description of Artificial Sequence: Synthetic oligonucleotide"
gcuagcacuugguuaacag

SEQ ID NO: 952 - RNA, 19 nt, Artificial Sequence
  source: /note="Description of Artificial Sequence: Synthetic oligonucleotide"
gguuaacagcuuuugcuuu

SEQ ID NO: 953 - RNA, 19 nt, Artificial Sequence
  source: /note="Description of Artificial Sequence: Synthetic oligonucleotide"
ugcuuuaagaguacuugga

SEQ ID NO: 954 - RNA, 19 nt, Artificial Sequence
  source: /note="Description of Artificial Sequence: Synthetic oligonucleotide"
guacuuggacaaguaaaua

SEQ ID NO: 955 - RNA, 19 nt, Artificial Sequence
  source: /note="Description of Artificial Sequence: Synthetic oligonucleotide"
caaguaaauaaauacguag

SEQ ID NO: 956 - RNA, 19 nt, Artificial Sequence
  source: /note="Description of Artificial Sequence: Synthetic oligonucleotide"
auaaauacguagagcagaa

SEQ ID NO: 957 - RNA, 19 nt, Artificial Sequence
  source: /note="Description of Artificial Sequence: Synthetic oligonucleotide"
gagcagaaccaaaauucaa

SEQ ID NO: 958 - RNA, 19 nt, Artificial Sequence
  source: /note="Description of Artificial Sequence: Synthetic oligonucleotide"
aauucaauuuguaauucuu

SEQ ID NO: 959 - RNA, 19 nt, Artificial Sequence
  source: /note="Description of Artificial Sequence: Synthetic oligonucleotide"
guaauucuuuauuguggcu

SEQ ID NO: 960 - RNA, 19 nt, Artificial Sequence
  source: /note="Description of Artificial Sequence: Synthetic oligonucleotide"
auuguggcuaguugagaau

SEQ ID NO: 961 - RNA, 19 nt, Artificial Sequence
  source: /note="Description of Artificial Sequence: Synthetic oligonucleotide"
cuaguugagaauuaucaau

SEQ ID NO: 962 - RNA, 19 nt, Artificial Sequence
  source: /note="Description of Artificial Sequence: Synthetic oligonucleotide"
uuaucaauuagauaaugga

SEQ ID NO: 963 - RNA, 19 nt, Artificial Sequence
  source: /note="Description of Artificial Sequence: Synthetic oligonucleotide"
aauggaucuuucaaggaaa

SEQ ID NO: 964 - RNA, 19 nt, Artificial Sequence
  source: /note="Description of Artificial Sequence: Synthetic oligonucleotide"
cuuucaaggaaaauucaca

SEQ ID NO: 965 - RNA, 19 nt, Artificial Sequence
  source: /note="Description of Artificial Sequence: Synthetic oligonucleotide"
aauucacaguaucaaccaa

SEQ ID NO: 966 - RNA, 19 nt, Artificial Sequence
  source: /note="Description of Artificial Sequence: Synthetic oligonucleotide"
guaucaaccaauaaaauua

SEQ ID NO: 967 - RNA, 19 nt, Artificial Sequence
  source: /note="Description of Artificial Sequence: Synthetic oligonucleotide"
aaaauuacaggguaccuug

SEQ ID NO: 968 - RNA, 19 nt, Artificial Sequence
  source: /note="Description of Artificial Sequence: Synthetic oligonucleotide"
aggguaccuugccuguuga

SEQ ID NO: 969 - RNA, 19 nt, Artificial Sequence
  source: /note="Description of Artificial Sequence: Synthetic oligonucleotide"
guugaagcccgagagaaca

SEQ ID NO: 970 - RNA, 19 nt, Artificial Sequence
  source: /note="Description of Artificial Sequence: Synthetic oligonucleotide"
ccgagagaacagcuuauau

SEQ ID NO: 971 - RNA, 19 nt, Artificial Sequence
  source: /note="Description of Artificial Sequence: Synthetic oligonucleotide"
gcuuauaucuuacagccuu

SEQ ID NO: 972 - RNA, 19 nt, Artificial Sequence
  source: /note="Description of Artificial Sequence: Synthetic oligonucleotide"
cuuacagccuuuacuguga

SEQ ID NO: 973 - RNA, 19 nt, Artificial Sequence
  source: /note="Description of Artificial Sequence: Synthetic oligonucleotide"
gaauuagaaaggcuuucga

SEQ ID NO: 974 - RNA, 19 nt, Artificial Sequence
  source: /note="Description of Artificial Sequence: Synthetic oligonucleotide"
ggcuuucgauauaugcccc

SEQ ID NO: 975 - RNA, 19 nt, Artificial Sequence
  source: /note="Description of Artificial Sequence: Synthetic oligonucleotide"
gauauaugcccccugguga

SEQ ID NO: 976 - RNA, 19 nt, Artificial Sequence
  source: /note="Description of Artificial Sequence: Synthetic oligonucleotide"
ggugaaaaucgacacagcu

SEQ ID NO: 977 - RNA, 19 nt, Artificial Sequence
  source: /note="Description of Artificial Sequence: Synthetic oligonucleotide"
cgacacagcucuaauuaaa

SEQ ID NO: 978 - RNA, 19 nt, Artificial Sequence
  source: /note="Description of Artificial Sequence: Synthetic oligonucleotide"
gcucuaauuaaagcugaca

SEQ ID NO: 979 - RNA, 19 nt, Artificial Sequence
  source: /note="Description of Artificial Sequence: Synthetic oligonucleotide"
cugacaacuuucugcuuga

SEQ ID NO: 980 - RNA, 19 nt, Artificial Sequence
  source: /note="Description of Artificial Sequence: Synthetic oligonucleotide"
cuuucugcuugaaaauaca

SEQ ID NO: 981 - RNA, 19 nt, Artificial Sequence
  source: /note="Description of Artificial Sequence: Synthetic oligonucleotide"
aaaauacacugccagccca

SEQ ID NO: 982 - RNA, 19 nt, Artificial Sequence
  source: /note="Description of Artificial Sequence: Synthetic oligonucleotide"
agcccagagcaccuuuaca

SEQ ID NO: 983 - RNA, 19 nt, Artificial Sequence
  source: /note="Description of Artificial Sequence: Synthetic oligonucleotide"
gcaccuuuacauuggccau

SEQ ID NO: 984 - RNA, 19 nt, Artificial Sequence
  source: /note="Description of Artificial Sequence: Synthetic oligonucleotide"
acauuggccauuucugcgu

SEQ ID NO: 985 - RNA, 19 nt, Artificial Sequence
  source: /note="Description of Artificial Sequence: Synthetic oligonucleotide"
cugcguaugcucuuucccu

SEQ ID NO: 986 - RNA, 19 nt, Artificial Sequence
  source: /note="Description of Artificial Sequence: Synthetic oligonucleotide"
cuuucccugggagauaaaa

SEQ ID NO: 987 - RNA, 19 nt, Artificial Sequence
  source: /note="Description of Artificial Sequence: Synthetic oligonucleotide"
gagauaaaacucacccaca

SEQ ID NO: 988 - RNA, 19 nt, Artificial Sequence
  source: /note="Description of Artificial Sequence: Synthetic oligonucleotide"
acucacccacaguuucguu

SEQ ID NO: 989 - RNA, 19 nt, Artificial Sequence
  source: /note="Description of Artificial Sequence: Synthetic oligonucleotide"
caguuucguucaauuguuu

SEQ ID NO: 990 - RNA, 19 nt, Artificial Sequence
  source: /note="Description of Artificial Sequence: Synthetic oligonucleotide"
caauuguuucagcuuugaa

SEQ ID NO: 991 - RNA, 19 nt, Artificial Sequence
  source: /note="Description of Artificial Sequence: Synthetic oligonucleotide"
cuuugaagagagaagcuuu

SEQ ID NO: 992 - RNA, 19 nt, Artificial Sequence
  source: /note="Description of Artificial Sequence: Synthetic oligonucleotide"
gagagaagcuuugguuaaa

SEQ ID NO: 993 - RNA, 19 nt, Artificial Sequence
  source: /note="Description of Artificial Sequence: Synthetic oligonucleotide"
guuaaagguaauccaccca

SEQ ID NO: 994 - RNA, 19 nt, Artificial Sequence
  source: /note="Description of Artificial Sequence: Synthetic oligonucleotide"
aauccacccauuuaucguu

SEQ ID NO: 995 - RNA, 19 nt, Artificial Sequence
  source: /note="Description of Artificial Sequence: Synthetic oligonucleotide"
cauuuaucguuuuuggaaa

SEQ ID NO: 996 - RNA, 19 nt, Artificial Sequence
  source: /note="Description of Artificial Sequence: Synthetic oligonucleotide"
uuuggaaagacaaucuuca

SEQ ID NO: 997 - RNA, 19 nt, Artificial Sequence
  source: /note="Description of Artificial Sequence: Synthetic oligonucleotide"
aaucuucagcauaaagaca

SEQ ID NO: 998 - RNA, 19 nt, Artificial Sequence
  source: /note="Description of Artificial Sequence: Synthetic oligonucleotide"
cauaaagacagcucuguac

SEQ ID NO: 999 - RNA, 19 nt, Artificial Sequence
  source: /note="Description of Artificial Sequence: Synthetic oligonucleotide"
cucuguaccuaacacuggu

SEQ ID NO: 1000 - RNA, 19 nt, Artificial Sequence
  source: /note="Description of Artificial Sequence: Synthetic oligonucleotide"
acacugguacggcacguau

SEQ ID NO: 1001 - RNA, 19 nt, Artificial Sequence
  source: /note="Description of Artificial Sequence: Synthetic oligonucleotide"
ggcacguaugguagaaaca

SEQ ID NO: 1002 - RNA, 19 nt, Artificial Sequence
  source: /note="Description of Artificial Sequence: Synthetic oligonucleotide"
gguagaaacaacugccuau

SEQ ID NO: 1003 - RNA, 19 nt, Artificial Sequence
  source: /note="Description of Artificial Sequence: Synthetic oligonucleotide"
caacugccuaugcuuuacu

SEQ ID NO: 1004 - RNA, 19 nt, Artificial Sequence
  source: /note="Description of Artificial Sequence: Synthetic oligonucleotide"
cuuuacucaccagucugaa

SEQ ID NO: 1005 - RNA, 19 nt, Artificial Sequence
  source: /note="Description of Artificial Sequence: Synthetic oligonucleotide"
gucugaacuugaaagauau

SEQ ID NO: 1006 - RNA, 19 nt, Artificial Sequence
  source: /note="Description of Artificial Sequence: Synthetic oligonucleotide"
acuugaaagauauaaauua

SEQ ID NO: 1007 - RNA, 19 nt, Artificial Sequence
  source: /note="Description of Artificial Sequence: Synthetic oligonucleotide"
uauaaauuauguuaaccca

SEQ ID NO: 1008 - RNA, 19 nt, Artificial Sequence
  source: /note="Description of Artificial Sequence: Synthetic oligonucleotide"
guuaacccagucaucaaau

SEQ ID NO: 1009 - RNA, 19 nt, Artificial Sequence
  source: /note="Description of Artificial Sequence: Synthetic oligonucleotide"
ucaucaaauggcuaucaga

SEQ ID NO: 1010 - RNA, 19 nt, Artificial Sequence
  source: /note="Description of Artificial Sequence: Synthetic oligonucleotide"
uaucagaagagcagaggua

SEQ ID NO: 1011 - RNA, 19 nt, Artificial Sequence
  source: /note="Description of Artificial Sequence: Synthetic oligonucleotide"
agagguauggagguggcuu

SEQ ID NO: 1012 - RNA, 19 nt, Artificial Sequence
  source: /note="Description of Artificial Sequence: Synthetic oligonucleotide"
gagguggcuuuuauucaac

SEQ ID NO: 1013 - RNA, 19 nt, Artificial Sequence
  source: /note="Description of Artificial Sequence: Synthetic oligonucleotide"
uauucaacccaggacacaa

SEQ ID NO: 1014 - RNA, 19 nt, Artificial Sequence
  source: /note="Description of Artificial Sequence: Synthetic oligonucleotide"
aggacacaaucaaugccau

SEQ ID NO: 1015 - RNA, 19 nt, Artificial Sequence
  source: /note="Description of Artificial Sequence: Synthetic oligonucleotide"
caaucaaugccauugaggg

SEQ ID NO: 1016 - RNA, 19 nt, Artificial Sequence
  source: /note="Description of Artificial Sequence: Synthetic oligonucleotide"
cauugagggccugacggaa

SEQ ID NO: 1017 - RNA, 19 nt, Artificial Sequence
  source: /note="Description of Artificial Sequence: Synthetic oligonucleotide"
acggaauauucacuccugg

SEQ ID NO: 1018 - RNA, 19 nt, Artificial Sequence
  source: /note="Description of Artificial Sequence: Synthetic oligonucleotide"
uucacuccugguuaaacaa

SEQ ID NO: 1019 - RNA, 19 nt, Artificial Sequence
  source: /note="Description of Artificial Sequence: Synthetic oligonucleotide"
gguuaaacaacuccgcuug

SEQ ID NO: 1020 - RNA, 19 nt, Artificial Sequence
  source: /note="Description of Artificial Sequence: Synthetic oligonucleotide"
ccgcuugaguauggacauc

SEQ ID NO: 1021 - RNA, 19 nt, Artificial Sequence
  source: /note="Description of Artificial Sequence: Synthetic oligonucleotide"
ggacaucgauguuucuuac

SEQ ID NO: 1022 - RNA, 19 nt, Artificial Sequence
  source: /note="Description of Artificial Sequence: Synthetic oligonucleotide"
cgauguuucuuacaagcau

SEQ ID NO: 1023 - RNA, 19 nt, Artificial Sequence
  source: /note="Description of Artificial Sequence: Synthetic oligonucleotide"
caagcauaaaggugccuua

SEQ ID NO: 1024 - RNA, 19 nt, Artificial Sequence
  source: /note="Description of Artificial Sequence: Synthetic oligonucleotide"
gugccuuacauaauuauaa

SEQ ID NO: 1025 - RNA, 19 nt, Artificial Sequence
  source: /note="Description of Artificial Sequence: Synthetic oligonucleotide"
acauaauuauaaaaugaca

SEQ ID NO: 1026 - RNA, 19 nt, Artificial Sequence
  source: /note="Description of Artificial Sequence: Synthetic oligonucleotide"
aaaaugacagacaagaauu

SEQ ID NO: 1027 - RNA, 19 nt, Artificial Sequence
  source: /note="Description of Artificial Sequence: Synthetic oligonucleotide"
caagaauuuccuugggagg

SEQ ID NO: 1028 - RNA, 19 nt, Artificial Sequence
  source: /note="Description of Artificial Sequence: Synthetic oligonucleotide"
ccuugggaggccaguagag

SEQ ID NO: 1029 - RNA, 19 nt, Artificial Sequence
  source: /note="Description of Artificial Sequence: Synthetic oligonucleotide"
aguagaggugcuucucaau

SEQ ID NO: 1030 - RNA, 19 nt, Artificial Sequence
  source: /note="Description of Artificial Sequence: Synthetic oligonucleotide"
cuucucaaugaugaccuca

SEQ ID NO: 1031 - RNA, 19 nt, Artificial Sequence
  source: /note="Description of Artificial Sequence: Synthetic oligonucleotide"
ugaccucauugucaguaca

SEQ ID NO: 1032 - RNA, 19 nt, Artificial Sequence
  source: /note="Description of Artificial Sequence: Synthetic oligonucleotide"
gucaguacaggauuuggca

SEQ ID NO: 1033 - RNA, 19 nt, Artificial Sequence
  source: /note="Description of Artificial Sequence: Synthetic oligonucleotide"
aggauuuggcaguggcuug

SEQ ID NO: 1034 - RNA, 19 nt, Artificial Sequence
  source: /note="Description of Artificial Sequence: Synthetic oligonucleotide"
uggcuuggcuacaguacau

SEQ ID NO: 1035 - RNA, 19 nt, Artificial Sequence
  source: /note="Description of Artificial Sequence: Synthetic oligonucleotide"
gcuacaguacauguaacaa

SEQ ID NO: 1036 - RNA, 19 nt, Artificial Sequence
  source: /note="Description of Artificial Sequence: Synthetic oligonucleotide"
aacaacuguaguucacaaa

SEQ ID NO: 1037 - RNA, 19 nt, Artificial Sequence
  source: /note="Description of Artificial Sequence: Synthetic oligonucleotide"
guaguucacaaaaccagua

SEQ ID NO: 1038 - RNA, 19 nt, Artificial Sequence
  source: /note="Description of Artificial Sequence: Synthetic oligonucleotide"
aaaccaguaccucugagga

SEQ ID NO: 1039 - RNA, 19 nt, Artificial Sequence
  source: /note="Description of Artificial Sequence: Synthetic oligonucleotide"
ugaggaaguuugcagcuuu

SEQ ID NO: 1040 - RNA, 19 nt, Artificial Sequence
  source: /note="Description of Artificial Sequence: Synthetic oligonucleotide"
ugcagcuuuuauuugaaaa

SEQ ID NO: 1041 - RNA, 19 nt, Artificial Sequence
  source: /note="Description of Artificial Sequence: Synthetic oligonucleotide"
auuugaaaaucgauacuca

SEQ ID NO: 1042 - RNA, 19 nt, Artificial Sequence
  source: /note="Description of Artificial Sequence: Synthetic oligonucleotide"
cgauacucaggauauugaa

SEQ ID NO: 1043 - RNA, 19 nt, Artificial Sequence
  source: /note="Description of Artificial Sequence: Synthetic oligonucleotide"
ggauauugaagcaucccac

SEQ ID NO: 1044 - RNA, 19 nt, Artificial Sequence
  source: /note="Description of Artificial Sequence: Synthetic oligonucleotide"
gaagcaucccacuacagag

SEQ ID NO: 1045 - RNA, 19 nt, Artificial Sequence
  source: /note="Description of Artificial Sequence: Synthetic oligonucleotide"
acuacagaggcuacggaaa

SEQ ID NO: 1046 - RNA, 19 nt, Artificial Sequence
  source: /note="Description of Artificial Sequence: Synthetic oligonucleotide"
cggaaacucugauuacaaa

SEQ ID NO: 1047 - RNA, 19 nt, Artificial Sequence
  source: /note="Description of Artificial Sequence: Synthetic oligonucleotide"
ugauuacaaacgcauagua

SEQ ID NO: 1048 - RNA, 19 nt, Artificial Sequence
  source: /note="Description of Artificial Sequence: Synthetic oligonucleotide"
gcauaguagcaugugccag

SEQ ID NO: 1049 - RNA, 19 nt, Artificial Sequence
  source: /note="Description of Artificial Sequence: Synthetic oligonucleotide"
gcaugugccagcuacaagc

SEQ ID NO: 1050 - RNA, 19 nt, Artificial Sequence
  source: /note="Description of Artificial Sequence: Synthetic oligonucleotide"
cuacaagcccagcagggaa

SEQ ID NO: 1051 - RNA, 19 nt, Artificial Sequence
  source: /note="Description of Artificial Sequence: Synthetic oligonucleotide"
cagcagggaagaaucauca

SEQ ID NO: 1052 - RNA, 19 nt, Artificial Sequence
  source: /note="Description of Artificial Sequence: Synthetic oligonucleotide"
gaaucaucaucuggauccu

SEQ ID NO: 1053 - RNA, 19 nt, Artificial Sequence
  source: /note="Description of Artificial Sequence: Synthetic oligonucleotide"
gauccucucaugcggugau

SEQ ID NO: 1054 - RNA, 19 nt, Artificial Sequence
  source: /note="Description of Artificial Sequence: Synthetic oligonucleotide"
cucaugcggugauggacau

SEQ ID NO: 1055 - RNA, 19 nt, Artificial Sequence
  source: /note="Description of Artificial Sequence: Synthetic oligonucleotide"
gauggacaucuccuugccu

SEQ ID NO: 1056 - RNA, 19 nt, Artificial Sequence
  source: /note="Description of Artificial Sequence: Synthetic oligonucleotide"
cuugccuacuggaaucagu

SEQ ID NO: 1057 - RNA, 19 nt, Artificial Sequence
  source: /note="Description of Artificial Sequence: Synthetic oligonucleotide"
gaaucagugcaaaugaaga

SEQ ID NO: 1058 - RNA, 19 nt, Artificial Sequence
  source: /note="Description of Artificial Sequence: Synthetic oligonucleotide"
aaaugaagaagacuuaaaa

SEQ ID NO: 1059 - RNA, 19 nt, Artificial Sequence
  source: /note="Description of Artificial Sequence: Synthetic oligonucleotide"
gaagacuuaaaagcccuug

SEQ ID NO: 1060 - RNA, 19 nt, Artificial Sequence
  source: /note="Description of Artificial Sequence: Synthetic oligonucleotide"
ccuuguggaagggguggau

SEQ ID NO: 1061 - RNA, 19 nt, Artificial Sequence
  source: /note="Description of Artificial Sequence: Synthetic oligonucleotide"
gaagggguggaucaacuau

SEQ ID NO: 1062 - RNA, 19 nt, Artificial Sequence
  source: /note="Description of Artificial Sequence: Synthetic oligonucleotide"
aucaacuauucacugauua

SEQ ID NO: 1063 - RNA, 19 nt, Artificial Sequence
  source: /note="Description of Artificial Sequence: Synthetic oligonucleotide"
cacugauuaccaaaucaaa

SEQ ID NO: 1064 - RNA, 19 nt, Artificial Sequence
  source: /note="Description of Artificial Sequence: Synthetic oligonucleotide"
aucaaagauggacauguua

SEQ ID NO: 1065 - RNA, 19 nt, Artificial Sequence
  source: /note="Description of Artificial Sequence: Synthetic oligonucleotide"
ggacauguuauucugcaac

SEQ ID NO: 1066 - RNA, 19 nt, Artificial Sequence
  source: /note="Description of Artificial Sequence: Synthetic oligonucleotide"
ucugcaacugaauucgauu

SEQ ID NO: 1067 - RNA, 19 nt, Artificial Sequence
  source: /note="Description of Artificial Sequence: Synthetic oligonucleotide"
gaauucgauucccuccagu

SEQ ID NO: 1068 - RNA, 19 nt, Artificial Sequence
  source: /note="Description of Artificial Sequence: Synthetic oligonucleotide"
cccuccagugauuuccuuu

SEQ ID NO: 1069 - RNA, 19 nt, Artificial Sequence
  source: /note="Description of Artificial Sequence: Synthetic oligonucleotide"
gauuuccuuuguguacgau

SEQ ID NO: 1070 - RNA, 19 nt, Artificial Sequence
  source: /note="Description of Artificial Sequence: Synthetic oligonucleotide"
guacgauuccggauauuug

SEQ ID NO: 1071 - RNA, 19 nt, Artificial Sequence
  source: /note="Description of Artificial Sequence: Synthetic oligonucleotide"
cggauauuugaacucuuug

SEQ ID NO: 1072 - RNA, 19 nt, Artificial Sequence
  source: /note="Description of Artificial Sequence: Synthetic oligonucleotide"
acucuuugaaguuggguuu

SEQ ID NO: 1073 - RNA, 19 nt, Artificial Sequence
  source: /note="Description of Artificial Sequence: Synthetic oligonucleotide"
aguuggguuucucaguccu

SEQ ID NO: 1074 - RNA, 19 nt, Artificial Sequence
  source: /note="Description of Artificial Sequence: Synthetic oligonucleotide"
uucucaguccugccacuuu

SEQ ID NO: 1075 - RNA, 19 nt, Artificial Sequence
  source: /note="Description of Artificial Sequence: Synthetic oligonucleotide"
cacuuucacaguguacgaa

SEQ ID NO: 1076 - RNA, 19 nt, Artificial Sequence
  source: /note="Description of Artificial Sequence: Synthetic oligonucleotide"
cacaguguacgaauaccac

SEQ ID NO: 1077 - RNA, 19 nt, Artificial Sequence
  source: /note="Description of Artificial Sequence: Synthetic oligonucleotide"
accacagaccagauaaaca

SEQ ID NO: 1078 - RNA, 19 nt, Artificial Sequence
  source: /note="Description of Artificial Sequence: Synthetic oligonucleotide"
ccagauaaacaguguacca

SEQ ID NO: 1079 - RNA, 19 nt, Artificial Sequence
  source: /note="Description of Artificial Sequence: Synthetic oligonucleotide"
caguguaccauguuuuaua

SEQ ID NO: 1080 - RNA, 19 nt, Artificial Sequence
  source: /note="Description of Artificial Sequence: Synthetic oligonucleotide"
guuuuauagcacuuccaau

SEQ ID NO: 1081 - RNA, 19 nt, Artificial Sequence
  source: /note="Description of Artificial Sequence: Synthetic oligonucleotide"
cuuccaauaucaaaauuca

SEQ ID NO: 1082 - RNA, 19 nt, Artificial Sequence
  source: /note="Description of Artificial Sequence: Synthetic oligonucleotide"
aucaaaauucagaaagucu

SEQ ID NO: 1083 - RNA, 19 nt, Artificial Sequence
  source: /note="Description of Artificial Sequence: Synthetic oligonucleotide"
gaaagucugugaaggagcc

SEQ ID NO: 1084 - RNA, 19 nt, Artificial Sequence
  source: /note="Description of Artificial Sequence: Synthetic oligonucleotide"
gaaggagccgcgugcaagu

SEQ ID NO: 1085 - RNA, 19 nt, Artificial Sequence
  source: /note="Description of Artificial Sequence: Synthetic oligonucleotide"
cgugcaaguguguagaagc

SEQ ID NO: 1086 - RNA, 19 nt, Artificial Sequence
  source: /note="Description of Artificial Sequence: Synthetic oligonucleotide"
guagaagcugauugugggc

SEQ ID NO: 1087 - RNA, 19 nt, Artificial Sequence
  source: /note="Description of Artificial Sequence: Synthetic oligonucleotide"
cugauugugggcaaaugca

SEQ ID NO: 1088 - RNA, 19 nt, Artificial Sequence
  source: /note="Description of Artificial Sequence: Synthetic oligonucleotide"
gcaaaugcaggaagaauug

SEQ ID NO: 1089 - RNA, 19 nt, Artificial Sequence
  source: /note="Description of Artificial Sequence: Synthetic oligonucleotide"
gaagaauuggaucugacaa

SEQ ID NO: 1090 - RNA, 19 nt, Artificial Sequence
  source: /note="Description of Artificial Sequence: Synthetic oligonucleotide"
cugacaaucucugcagaga

SEQ ID NO: 1091 - RNA, 19 nt, Artificial Sequence
  source: /note="Description of Artificial Sequence: Synthetic oligonucleotide"
gcagagacaagaaaacaaa

SEQ ID NO: 1092 - RNA, 19 nt, Artificial Sequence
  source: /note="Description of Artificial Sequence: Synthetic oligonucleotide"
caagaaaacaaacagcaug

SEQ ID NO: 1093 - RNA, 19 nt, Artificial Sequence
  source: /note="Description of Artificial Sequence: Synthetic oligonucleotide"
acagcauguaaaccagaga

SEQ ID NO: 1094 - RNA, 19 nt, Artificial Sequence
  source: /note="Description of Artificial Sequence: Synthetic oligonucleotide"
ccagagauugcauaugcuu

SEQ ID NO: 1095 - RNA, 19 nt, Artificial Sequence
  source: /note="Description of Artificial Sequence: Synthetic oligonucleotide"
gcauaugcuuauaaaguua

SEQ ID NO: 1096 - RNA, 19 nt, Artificial Sequence
  source: /note="Description of Artificial Sequence: Synthetic oligonucleotide"
uuauaaaguuagcaucaca

SEQ ID NO: 1097 - RNA, 19 nt, Artificial Sequence
  source: /note="Description of Artificial Sequence: Synthetic oligonucleotide"
caucacauccaucacugua

SEQ ID NO: 1098 - RNA, 19 nt, Artificial Sequence
  source: /note="Description of Artificial Sequence: Synthetic oligonucleotide"
ucacuguagaaaauguuuu

SEQ ID NO: 1099 - RNA, 19 nt, Artificial Sequence
  source: /note="Description of Artificial Sequence: Synthetic oligonucleotide"
agaaaauguuuuugucaag

SEQ ID NO: 1100 - RNA, 19 nt, Artificial Sequence
  source: /note="Description of Artificial Sequence: Synthetic oligonucleotide"
uuugucaaguacaaggcaa

SEQ ID NO: 1101 - RNA, 19 nt, Artificial Sequence
  source: /note="Description of Artificial Sequence: Synthetic oligonucleotide"
aggcaacccuucuggauau

SEQ ID NO: 1102 - RNA, 19 nt, Artificial Sequence
  source: /note="Description of Artificial Sequence: Synthetic oligonucleotide"
ccuucuggauaucuacaaa

SEQ ID NO: 1103 - RNA, 19 nt, Artificial Sequence
  source: /note="Description of Artificial Sequence: Synthetic oligonucleotide"
uaucuacaaaacuggggaa

SEQ ID NO: 1104 - RNA, 19 nt, Artificial Sequence
  source: /note="Description of Artificial Sequence: Synthetic oligonucleotide"
cuggggaagcuguugcuga

SEQ ID NO: 1105 - RNA, 19 nt, Artificial Sequence
  source: /note="Description of Artificial Sequence: Synthetic oligonucleotide"
cuguugcugagaaagacuc

SEQ ID NO: 1106 - RNA, 19 nt, Artificial Sequence
  source: /note="Description of Artificial Sequence: Synthetic oligonucleotide"
gacucugagauuaccuuca

SEQ ID NO: 1107 - RNA, 19 nt, Artificial Sequence
  source: /note="Description of Artificial Sequence: Synthetic oligonucleotide"
gagauuaccuucauuaaaa

SEQ ID NO: 1108 - RNA, 19 nt, Artificial Sequence
  source: /note="Description of Artificial Sequence: Synthetic oligonucleotide"
auuaaaaagguaaccugua

SEQ ID NO: 1109 - RNA, 19 nt, Artificial Sequence
  source: /note="Description of Artificial Sequence: Synthetic oligonucleotide"
uaaccuguacuaacgcuga

SEQ ID NO: 1110 - RNA, 19 nt, Artificial Sequence
  source: /note="Description of Artificial Sequence: Synthetic oligonucleotide"
cuaacgcugagcugguaaa

SEQ ID NO: 1111 - RNA, 19 nt, Artificial Sequence
  source: /note="Description of Artificial Sequence: Synthetic oligonucleotide"
gguaaaaggaagacaguac

SEQ ID NO: 1112 - RNA, 19 nt, Artificial Sequence
  source: /note="Description of Artificial Sequence: Synthetic oligonucleotide"
gaagacaguacuuaauuau

SEQ ID NO: 1113 - RNA, 19 nt, Artificial Sequence
  source: /note="Description of Artificial Sequence: Synthetic oligonucleotide"
cuuaauuauggguaaagaa

SEQ ID NO: 1114 - RNA, 19 nt, Artificial Sequence
  source: /note="Description of Artificial Sequence: Synthetic oligonucleotide"
uaaagaagcccuccagaua

SEQ ID NO: 1115 - RNA, 19 nt, Artificial Sequence
  source: /note="Description of Artificial Sequence: Synthetic oligonucleotide"
ccuccagauaaaauacaau

SEQ ID NO: 1116 - RNA, 19 nt, Artificial Sequence
  source: /note="Description of Artificial Sequence: Synthetic oligonucleotide"
aaauacaauuucaguuuca

SEQ ID NO: 1117 - RNA, 19 nt, Artificial Sequence
  source: /note="Description of Artificial Sequence: Synthetic oligonucleotide"
caguuucagguacaucuac

SEQ ID NO: 1118 - RNA, 19 nt, Artificial Sequence
  source: /note="Description of Artificial Sequence: Synthetic oligonucleotide"
gguacaucuacccuuuaga

SEQ ID NO: 1119 - RNA, 19 nt, Artificial Sequence
  source: /note="Description of Artificial Sequence: Synthetic oligonucleotide"
ccuuuagauuccuugaccu

SEQ ID NO: 1120 - RNA, 19 nt, Artificial Sequence
  source: /note="Description of Artificial Sequence: Synthetic oligonucleotide"
ccuugaccuggauugaaua

SEQ ID NO: 1121 - RNA, 19 nt, Artificial Sequence
  source: /note="Description of Artificial Sequence: Synthetic oligonucleotide"
ggauugaauacuggccuag

SEQ ID NO: 1122 - RNA, 19 nt, Artificial Sequence
  source: /note="Description of Artificial Sequence: Synthetic oligonucleotide"
cuggccuagagacacaaca

SEQ ID NO: 1123 - RNA, 19 nt, Artificial Sequence
  source: /note="Description of Artificial Sequence: Synthetic oligonucleotide"
gagacacaacauguucauc

SEQ ID NO: 1124 - RNA, 19 nt, Artificial Sequence
  source: /note="Description of Artificial Sequence: Synthetic oligonucleotide"
guucaucgugucaagcauu

SEQ ID NO: 1125 - RNA, 19 nt, Artificial Sequence
  source: /note="Description of Artificial Sequence: Synthetic oligonucleotide"
gucaagcauuuuuagcuaa

SEQ ID NO: 1126 - RNA, 19 nt, Artificial Sequence
  source: /note="Description of Artificial Sequence: Synthetic oligonucleotide"
agcuaauuuagaugaauuu

SEQ ID NO: 1127 - RNA, 19 nt, Artificial Sequence
  source: /note="Description of Artificial Sequence: Synthetic oligonucleotide"
agaugaauuugccgaagau

SEQ ID NO: 1128 - RNA, 19 nt, Artificial Sequence
  source: /note="Description of Artificial Sequence: Synthetic oligonucleotide"
ccgaagauaucuuuuuaaa

SEQ ID NO: 1129 - RNA, 19 nt, Artificial Sequence
  source: /note="Description of Artificial Sequence: Synthetic oligonucleotide"
cuuuuuaaauggaugcuaa

SEQ ID NO: 1130 - RNA, 19 nt, Artificial Sequence
  source: /note="Description of Artificial Sequence: Synthetic oligonucleotide"
ggaugcuaaaauuccugaa

SEQ ID NO: 1131 - RNA, 19 nt, Artificial Sequence
  source: /note="Description of Artificial Sequence: Synthetic oligonucleotide"
uaaaauuccugaaguucag

SEQ ID NO: 1132 - RNA, 19 nt, Artificial Sequence
  source: /note="Description of Artificial Sequence: Synthetic oligonucleotide"
aguucagcugcauacaguu

SEQ ID NO: 1133 - RNA, 19 nt, Artificial Sequence
  source: /note="Description of Artificial Sequence: Synthetic oligonucleotide"
gcauacaguuugcacuuau

SEQ ID NO: 1134 - RNA, 19 nt, Artificial Sequence
  source: /note="Description of Artificial Sequence: Synthetic oligonucleotide"
acuuauggacuccuguugu

SEQ ID NO: 1135 - RNA, 19 nt, Artificial Sequence
  source: /note="Description of Artificial Sequence: Synthetic oligonucleotide"
ggacuccuguuguugaagu

SEQ ID NO: 1136 - RNA, 19 nt, Artificial Sequence
  source: /note="Description of Artificial Sequence: Synthetic oligonucleotide"
uguugaaguucguuuuuuu

SEQ ID NO: 1137 - RNA, 19 nt, Artificial Sequence
  source: /note="Description of Artificial Sequence: Synthetic oligonucleotide"
uuuuuuguuuucuucuuuu

SEQ ID NO: 1138 - RNA, 19 nt, Artificial Sequence
  source: /note="Description of Artificial Sequence: Synthetic oligonucleotide"
ucuucuuuuuuuaaacauu

SEQ ID NO: 1139 - RNA, 19 nt, Artificial Sequence
  source: /note="Description of Artificial Sequence: Synthetic oligonucleotide"
uuuuuaaacauucauagcu

SEQ ID NO: 1140 - RNA, 19 nt, Artificial Sequence
  source: /note="Description of Artificial Sequence: Synthetic oligonucleotide"
auagcuggucuuauuugua

SEQ ID NO: 1141 - RNA, 19 nt, Artificial Sequence
  source: /note="Description of Artificial Sequence: Synthetic oligonucleotide"
gucuuauuuguaaagcuca

SEQ ID NO: 1142 - RNA, 19 nt, Artificial Sequence
  source: /note="Description of Artificial Sequence: Synthetic oligonucleotide"
aaagcucacuuuacuuaga

SEQ ID NO: 1143 - RNA, 19 nt, Artificial Sequence
  source: /note="Description of Artificial Sequence: Synthetic oligonucleotide"
acuuagaauuaguggcacu

SEQ ID NO: 1144 - RNA, 19 nt, Artificial Sequence
  source: /note="Description of Artificial Sequence: Synthetic oligonucleotide"
aguggcacuugcuuuuauu

SEQ ID NO: 1145 - RNA, 19 nt, Artificial Sequence
  source: /note="Description of Artificial Sequence: Synthetic oligonucleotide"
gcuuuuauuagagaaugau

SEQ ID NO: 1146 - RNA, 19 nt, Artificial Sequence
  source: /note="Description of Artificial Sequence: Synthetic oligonucleotide"
gagaaugauuucaaaugcu

SEQ ID NO: 1147 - RNA, 19 nt, Artificial Sequence
  source: /note="Description of Artificial Sequence: Synthetic oligonucleotide"
uuucaaaugcuguaacuuu

SEQ ID NO: 1148 - RNA, 19 nt, Artificial Sequence
  source: /note="Description of Artificial Sequence: Synthetic oligonucleotide"
guaacuuucugaaauaaca

SEQ ID NO: 1149 - RNA, 19 nt, Artificial Sequence
  source: /note="Description of Artificial Sequence: Synthetic oligonucleotide"
gaaauaacauggccuugga

SEQ ID NO: 1150 - RNA, 19 nt, Artificial Sequence
  source: /note="Description of Artificial Sequence: Synthetic oligonucleotide"
ccuuggagggcaugaagac

SEQ ID NO: 1151 - RNA, 19 nt, Artificial Sequence
  source: /note="Description of Artificial Sequence: Synthetic oligonucleotide"
agggcaugaagacagauac

SEQ ID NO: 1152 - RNA, 19 nt, Artificial Sequence
  source: /note="Description of Artificial Sequence: Synthetic oligonucleotide"
gauacuccuccaagguuau

SEQ ID NO: 1153 - RNA, 19 nt, Artificial Sequence
  source: /note="Description of Artificial Sequence: Synthetic oligonucleotide"
ccuccaagguuauuggaca

SEQ ID NO: 1154 - RNA, 19 nt, Artificial Sequence
  source: /note="Description of Artificial Sequence: Synthetic oligonucleotide"
ggacaccggaaacaauaaa

SEQ ID NO: 1155 - RNA, 19 nt, Artificial Sequence
  source: /note="Description of Artificial Sequence: Synthetic oligonucleotide"
gaaacaauaaauuggaaca

SEQ ID NO: 1156 - RNA, 19 nt, Artificial Sequence
  source: /note="Description of Artificial Sequence: Synthetic oligonucleotide"
auuggaacaccuccucaaa

SEQ ID NO: 1157 - RNA, 19 nt, Artificial Sequence
  source: /note="Description of Artificial Sequence: Synthetic oligonucleotide"
uccucaaaccuaccacuca

SEQ ID NO: 1158 - RNA, 19 nt, Artificial Sequence
  source: /note="Description of Artificial Sequence: Synthetic oligonucleotide"
cuaccacucaggaauguuu

SEQ ID NO: 1159 - RNA, 19 nt, Artificial Sequence
  source: /note="Description of Artificial Sequence: Synthetic oligonucleotide"
aauguuugcuggggccgaa

SEQ ID NO: 1160 - RNA, 19 nt, Artificial Sequence
  source: /note="Description of Artificial Sequence: Synthetic oligonucleotide"
ugcuggggccgaaagaaca

SEQ ID NO: 1161 - RNA, 19 nt, Artificial Sequence
  source: /note="Description of Artificial Sequence: Synthetic oligonucleotide"
aaagaacaguccauugaaa

SEQ ID NO: 1162 - RNA, 19 nt, Artificial Sequence
  source: /note="Description of Artificial Sequence: Synthetic oligonucleotide"
cauugaaagggaguauuac

SEQ ID NO: 1163 - RNA, 19 nt, Artificial Sequence
  source: /note="Description of Artificial Sequence: Synthetic oligonucleotide"
ggaguauuacaaaaacaug

SEQ ID NO: 1164 - RNA, 19 nt, Artificial Sequence
  source: /note="Description of Artificial Sequence: Synthetic oligonucleotide"
aaaacauggccuuugcuug

SEQ ID NO: 1165 - RNA, 19 nt, Artificial Sequence
  source: /note="Description of Artificial Sequence: Synthetic oligonucleotide"
gccuuugcuugaaagaaaa

SEQ ID NO: 1166 - RNA, 19 nt, Artificial Sequence
  source: /note="Description of Artificial Sequence: Synthetic oligonucleotide"
gaaagaaaauaccaaggaa

SEQ ID NO: 1167 - RNA, 19 nt, Artificial Sequence
  source: /note="Description of Artificial Sequence: Synthetic oligonucleotide"
ccaaggaacaggaaacuga

SEQ ID NO: 1168 - RNA, 19 nt, Artificial Sequence
  source: /note="Description of Artificial Sequence: Synthetic oligonucleotide"
aacugaucauuaaagccug

SEQ ID NO: 1169 - RNA, 19 nt, Artificial Sequence
  source: /note="Description of Artificial Sequence: Synthetic oligonucleotide"
auuaaagccugaguuugcu

SEQ ID NO: 1170 - RNA, 19 nt, Artificial Sequence
  source: /note="Description of Artificial Sequence: Synthetic oligonucleotide"
uagcaggaaaccacggaua

SEQ ID NO: 1171 - RNA, 19 nt, Artificial Sequence
  source: /note="Description of Artificial Sequence: Synthetic oligonucleotide"
uuggagguagcaggaaacc

SEQ ID NO: 1172 - RNA, 19 nt, Artificial Sequence
  source: /note="Description of Artificial Sequence: Synthetic oligonucleotide"
aaaggcccaugguuggagg

SEQ ID NO: 1173 - RNA, 19 nt, Artificial Sequence
  source: /note="Description of Artificial Sequence: Synthetic oligonucleotide"
aaguauucccaaaaggccc

SEQ ID NO: 1174 - RNA, 19 nt, Artificial Sequence
  source: /note="Description of Artificial Sequence: Synthetic oligonucleotide"
uuaaaaaacaaaguauucc

SEQ ID NO: 1175 - RNA, 19 nt, Artificial Sequence
  source: /note="Description of Artificial Sequence: Synthetic oligonucleotide"
ggaagauuaaaaaacaaag

SEQ ID NO: 1176 - RNA, 19 nt, Artificial Sequence
  source: /note="Description of Artificial Sequence: Synthetic oligonucleotide"
ccagguuuuccccaggaag

SEQ ID NO: 1177 - RNA, 19 nt, Artificial Sequence
  source: /note="Description of Artificial Sequence: Synthetic oligonucleotide"
uccuguccccagguuuucc

SEQ ID NO: 1178 - RNA, 19 nt, Artificial Sequence
  source: /note="Description of Artificial Sequence: Synthetic oligonucleotide"
auauguuugcuccuguccc

SEQ ID NO: 1179 - RNA, 19 nt, Artificial Sequence
  source: /note="Description of Artificial Sequence: Synthetic oligonucleotide"
cugaaaugacauauguuug

SEQ ID NO: 1180 - RNA, 19 nt, Artificial Sequence
  source: /note="Description of Artificial Sequence: Synthetic oligonucleotide"
uauuuuuggugcugaaaug

SEQ ID NO: 1181 - RNA, 19 nt, Artificial Sequence
  source: /note="Description of Artificial Sequence: Synthetic oligonucleotide"
cacggaauauuuuuggugc

SEQ ID NO: 1182 - RNA, 19 nt, Artificial Sequence
  source: /note="Description of Artificial Sequence: Synthetic oligonucleotide"
uucagaugcuccaacacgg

SEQ ID NO: 1183 - RNA, 19 nt, Artificial Sequence
  source: /note="Description of Artificial Sequence: Synthetic oligonucleotide"
caauauuuucagaugcucc

SEQ ID NO: 1184 - RNA, 19 nt, Artificial Sequence
  source: /note="Description of Artificial Sequence: Synthetic oligonucleotide"
cuugaaucacaauauuuuc

SEQ ID NO: 1185 - RNA, 19 nt, Artificial Sequence
  source: /note="Description of Artificial Sequence: Synthetic oligonucleotide"
guauccauaaacuugaauc

SEQ ID NO: 1186 - RNA, 19 nt, Artificial Sequence
  source: /note="Description of Artificial Sequence: Synthetic oligonucleotide"
caaaugcuucaguguaucc

SEQ ID NO: 1187 - RNA, 19 nt, Artificial Sequence
  source: /note="Description of Artificial Sequence: Synthetic oligonucleotide"
uuguugcaucaaaugcuuc

SEQ ID NO: 1188 - RNA, 19 nt, Artificial Sequence
  source: /note="Description of Artificial Sequence: Synthetic oligonucleotide"
uuuaauagagauuguugca

SEQ ID NO: 1189 - RNA, 19 nt, Artificial Sequence
  source: /note="Description of Artificial Sequence: Synthetic oligonucleotide"
auaacuuuuaauagagauu

SEQ ID NO: 1190 - RNA, 19 nt, Artificial Sequence
  source: /note="Description of Artificial Sequence: Synthetic oligonucleotide"
uuuuuuaucaggauaacuu

SEQ ID NO: 1191 - RNA, 19 nt, Artificial Sequence
  source: /note="Description of Artificial Sequence: Synthetic oligonucleotide"
uaacuaaauuuuuuaucag

SEQ ID NO: 1192 - RNA, 19 nt, Artificial Sequence
  source: /note="Description of Artificial Sequence: Synthetic oligonucleotide"
uggccugaggaguaacuaa

SEQ ID NO: 1193 - RNA, 19 nt, Artificial Sequence
  source: /note="Description of Artificial Sequence: Synthetic oligonucleotide"
aaaugaacauggccugagg

SEQ ID NO: 1194 - RNA, 19 nt, Artificial Sequence
  source: /note="Description of Artificial Sequence: Synthetic oligonucleotide"
uucucugaggauaaaugaa

SEQ ID NO: 1195 - RNA, 19 nt, Artificial Sequence
  source: /note="Description of Artificial Sequence: Synthetic oligonucleotide"
uuggaauuuauucucugag

SEQ ID NO: 1196 - RNA, 19 nt, Artificial Sequence
  source: /note="Description of Artificial Sequence: Synthetic oligonucleotide"
cagaguuuuggaauuuauu

SEQ ID NO: 1197 - RNA, 19 nt, Artificial Sequence
  source: /note="Description of Artificial Sequence: Synthetic oligonucleotide"
uauuguuaagauugcagag

SEQ ID NO: 1198 - RNA, 19 nt, Artificial Sequence
  source: /note="Description of Artificial Sequence: Synthetic oligonucleotide"
uuuugguuguauuguuaag

SEQ ID NO: 1199 - RNA, 19 nt, Artificial Sequence
  source: /note="Description of Artificial Sequence: Synthetic oligonucleotide"
caggcaauuguuuugguug

SEQ ID NO: 1200 - RNA, 19 nt, Artificial Sequence
  source: /note="Description of Artificial Sequence: Synthetic oligonucleotide"
uuuguccuccaggcaauug

SEQ ID NO: 1201 - RNA, 19 nt, Artificial Sequence
  source: /note="Description of Artificial Sequence: Synthetic oligonucleotide"
aagaaacuggguuuugucc

SEQ ID NO: 1202 - RNA, 19 nt, Artificial Sequence
  source: /note="Description of Artificial Sequence: Synthetic oligonucleotide"
aauacacauaagaaacugg

SEQ ID NO: 1203 - RNA, 19 nt, Artificial Sequence
  source: /note="Description of Artificial Sequence: Synthetic oligonucleotide"
acaacuuccaaauacacau

SEQ ID NO: 1204 - RNA, 19 nt, Artificial Sequence
  source: /note="Description of Artificial Sequence: Synthetic oligonucleotide"
augcuuugauacaacuucc

SEQ ID NO: 1205 - RNA, 19 nt, Artificial Sequence
  source: /note="Description of Artificial Sequence: Synthetic oligonucleotide"
uugaaaaaugcuuugauac

SEQ ID NO: 1206 - RNA, 19 nt, Artificial Sequence
  source: /note="Description of Artificial Sequence: Synthetic oligonucleotide"
uucuuuuugauuuugaaaa

SEQ ID NO: 1207 - RNA, 19 nt, Artificial Sequence
  source: /note="Description of Artificial Sequence: Synthetic oligonucleotide"
guuauuggcauucuuuuug

SEQ ID NO: 1208 - RNA, 19 nt, Artificial Sequence
  source: /note="Description of Artificial Sequence: Synthetic oligonucleotide"
auugucauagguuauuggc

SEQ ID NO: 1209 - RNA, 19 nt, Artificial Sequence
  source: /note="Description of Artificial Sequence: Synthetic oligonucleotide"
agaaauccauugucauagg

SEQ ID NO: 1210 - RNA, 19 nt, Artificial Sequence
  source: /note="Description of Artificial Sequence: Synthetic oligonucleotide"
augaaugaagagaaaucca

SEQ ID NO: 1211 - RNA, 19 nt, Artificial Sequence
  source: /note="Description of Artificial Sequence: Synthetic oligonucleotide"
agguuugucuguaugaaug

SEQ ID NO: 1212 - RNA, 19 nt, Artificial Sequence
  source: /note="Description of Artificial Sequence: Synthetic oligonucleotide"
guauaaacagguuugucug

SEQ ID NO: 1213 - RNA, 19 nt, Artificial Sequence
  source: /note="Description of Artificial Sequence: Synthetic oligonucleotide"
acuggucuggaguauaaac

SEQ ID NO: 1214 - RNA, 19 nt, Artificial Sequence
  source: /note="Description of Artificial Sequence: Synthetic oligonucleotide"
aacuuuuacugacuggucu

SEQ ID NO: 1215 - RNA, 19 nt, Artificial Sequence
  source: /note="Description of Artificial Sequence: Synthetic oligonucleotide"
auaaacucuaacuuuuacu

SEQ ID NO: 1216 - RNA, 19 nt, Artificial Sequence
  source: /note="Description of Artificial Sequence: Synthetic oligonucleotide"
cauucaacgaauaaacucu

SEQ ID NO: 1217 - RNA, 19 nt, Artificial Sequence
  source: /note="Description of Artificial Sequence: Synthetic oligonucleotide"
uucaagucgucauucaacg

SEQ ID NO: 1218 - RNA, 19 nt, Artificial Sequence
  source: /note="Description of Artificial Sequence: Synthetic oligonucleotide"
ucuuuuggcuggcuucaag

SEQ ID NO: 1219 - RNA, 19 nt, Artificial Sequence
  source: /note="Description of Artificial Sequence: Synthetic oligonucleotide"
caguuucucuuuuggcugg

SEQ ID NO: 1220 - RNA, 19 nt, Artificial Sequence
  source: /note="Description of Artificial Sequence: Synthetic oligonucleotide"
augaaaguuaagacaguuu

SEQ ID NO: 1221 - RNA, 19 nt, Artificial Sequence
  source: /note="Description of Artificial Sequence: Synthetic oligonucleotide"
uucaggaucuaugaaaguu

SEQ ID NO: 1222 - RNA, 19 nt, Artificial Sequence
  source: /note="Description of Artificial Sequence: Synthetic oligonucleotide"
ugauccuucaggaucuaug

SEQ ID NO: 1223 - RNA, 19 nt, Artificial Sequence
  source: /note="Description of Artificial Sequence: Synthetic oligonucleotide"
ugucaacuucugauccuuc

SEQ ID NO: 1224 - RNA, 19 nt, Artificial Sequence
  source: /note="Description of Artificial Sequence: Synthetic oligonucleotide"
aauuucuucuaccauguca

SEQ ID NO: 1225 - RNA, 19 nt, Artificial Sequence
  source: /note="Description of Artificial Sequence: Synthetic oligonucleotide"
caauaugaucaauuucuuc

SEQ ID NO: 1226 - RNA, 19 nt, Artificial Sequence
  source: /note="Description of Artificial Sequence: Synthetic oligonucleotide"
agauaauuccaauaugauc

SEQ ID NO: 1227 - RNA, 19 nt, Artificial Sequence
  source: /note="Description of Artificial Sequence: Synthetic oligonucleotide"
caggaaaagagauaauucc

SEQ ID NO: 1228 - RNA, 19 nt, Artificial Sequence
  source: /note="Description of Artificial Sequence: Synthetic oligonucleotide"
cuugaagucaggaaaagag

SEQ ID NO: 1229 - RNA, 19 nt, Artificial Sequence
  source: /note="Description of Artificial Sequence: Synthetic oligonucleotide"
uuagacggaaucuugaagu

SEQ ID NO: 1230 - RNA, 19 nt, Artificial Sequence
  source: /note="Description of Artificial Sequence: Synthetic oligonucleotide"
cauaucuaggauuagacgg

SEQ ID NO: 1231 - RNA, 19 nt, Artificial Sequence
  source: /note="Description of Artificial Sequence: Synthetic oligonucleotide"
uccacauaccauaucuagg

SEQ ID NO: 1232 - RNA, 19 nt, Artificial Sequence
  source: /note="Description of Artificial Sequence: Synthetic oligonucleotide"
uuagccuugaucguccaca

SEQ ID NO: 1233 - RNA, 19 nt, Artificial Sequence
  source: /note="Description of Artificial Sequence: Synthetic oligonucleotide"
uuauauuuagccuugaucg

SEQ ID NO: 1234 - RNA, 19 nt, Artificial Sequence
  source: /note="Description of Artificial Sequence: Synthetic oligonucleotide"
ugaaaaguccucuuuauau

SEQ ID NO: 1235 - RNA, 19 nt, Artificial Sequence
  source: /note="Description of Artificial Sequence: Synthetic oligonucleotide"
caguuguugaaaaguccuc

SEQ ID NO: 1236 - RNA, 19 nt, Artificial Sequence
  source: /note="Description of Artificial Sequence: Synthetic oligonucleotide"
aaauaugcgguuccaguug

SEQ ID NO: 1237 - RNA, 19 nt, Artificial Sequence
  source: /note="Description of Artificial Sequence: Synthetic oligonucleotide"
uuuaacuucaaaauaugcg

SEQ ID NO: 1238 - RNA, 19 nt, Artificial Sequence
  source: /note="Description of Artificial Sequence: Synthetic oligonucleotide"
aagacauauucuuuaacuu

SEQ ID NO: 1239 - RNA, 19 nt, Artificial Sequence
  source: /note="Description of Artificial Sequence: Synthetic oligonucleotide"
aauguggcaagacauauuc

SEQ ID NO: 1240 - RNA, 19 nt, Artificial Sequence
  source: /note="Description of Artificial Sequence: Synthetic oligonucleotide"
uugagacagaaaaaugugg

SEQ ID NO: 1241 - RNA, 19 nt, Artificial Sequence
  source: /note="Description of Artificial Sequence: Synthetic oligonucleotide"
ucuggcucgauugagacag

SEQ ID NO: 1242 - RNA, 19 nt, Artificial Sequence
  source: /note="Description of Artificial Sequence: Synthetic oligonucleotide"
uuauauucuggcucgauug

SEQ ID NO: 1243 - RNA, 19 nt, Artificial Sequence
  source: /note="Description of Artificial Sequence: Synthetic oligonucleotide"
aaccaaugaaauuauauuc

SEQ ID NO: 1244 - RNA, 19 nt, Artificial Sequence
  source: /note="Description of Artificial Sequence: Synthetic oligonucleotide"
uaaaguucuuguaaccaau

SEQ ID NO: 1245 - RNA, 19 nt, Artificial Sequence
  source: /note="Description of Artificial Sequence: Synthetic oligonucleotide"
ucaaaauucuuaaaguucu

SEQ ID NO: 1246 - RNA, 19 nt, Artificial Sequence
  source: /note="Description of Artificial Sequence: Synthetic oligonucleotide"
uauaguaauuucaaaauuc

SEQ ID NO: 1247 - RNA, 19 nt, Artificial Sequence
  source: /note="Description of Artificial Sequence: Synthetic oligonucleotide"
uugcuuuuauaguaauuuc

SEQ ID NO: 1248 - RNA, 19 nt, Artificial Sequence
  source: /note="Description of Artificial Sequence: Synthetic oligonucleotide"
uauaaaaauaucuugcuuu

SEQ ID NO: 1249 - RNA, 19 nt, Artificial Sequence
  source: /note="Description of Artificial Sequence: Synthetic oligonucleotide"
uacuuuauuauaaaaauau

SEQ ID NO: 1250 - RNA, 19 nt, Artificial Sequence
  source: /note="Description of Artificial Sequence: Synthetic oligonucleotide"
ucagccucagugacuacuu

SEQ ID NO: 1251 - RNA, 19 nt, Artificial Sequence
  source: /note="Description of Artificial Sequence: Synthetic oligonucleotide"
auaaacgucagccucagug

SEQ ID NO: 1252 - RNA, 19 nt, Artificial Sequence
  source: /note="Description of Artificial Sequence: Synthetic oligonucleotide"
uccaaaugugauauaaacg

SEQ ID NO: 1253 - RNA, 19 nt, Artificial Sequence
  source: /note="Description of Artificial Sequence: Synthetic oligonucleotide"
uucucuuauuccaaaugug

SEQ ID NO: 1254 - RNA, 19 nt, Artificial Sequence
  source: /note="Description of Artificial Sequence: Synthetic oligonucleotide"
uuuuaagucuucucuuauu

SEQ ID NO: 1255 - RNA, 19 nt, Artificial Sequence
  source: /note="Description of Artificial Sequence: Synthetic oligonucleotide"
uuuuugaucaucuuuuaag

SEQ ID NO: 1256 - RNA, 19 nt, Artificial Sequence
  source: /note="Description of Artificial Sequence: Synthetic oligonucleotide"
ucauuucuuuuugaucauc

SEQ ID NO: 1257 - RNA, 19 nt, Artificial Sequence
  source: /note="Description of Artificial Sequence: Synthetic oligonucleotide"
auugcuguuugcaucauuu

SEQ ID NO: 1258 - RNA, 19 nt, Artificial Sequence
  source: /note="Description of Artificial Sequence: Synthetic oligonucleotide"
uuguguuuugcauugcugu

SEQ ID NO: 1259 - RNA, 19 nt, Artificial Sequence
  source: /note="Description of Artificial Sequence: Synthetic oligonucleotide"
uuuaucaacauuguguuuu

SEQ ID NO: 1260 - RNA, 19 nt, Artificial Sequence
  source: /note="Description of Artificial Sequence: Synthetic oligonucleotide"
auuccauuuaucaacauug

SEQ ID NO: 1261 - RNA, 19 nt, Artificial Sequence
  source: /note="Description of Artificial Sequence: Synthetic oligonucleotide"
augugacuugagcaauucc

SEQ ID NO: 1262 - RNA, 19 nt, Artificial Sequence
  source: /note="Description of Artificial Sequence: Synthetic oligonucleotide"
aaucaaaugugacuugagc

SEQ ID NO: 1263 - RNA, 19 nt, Artificial Sequence
  source: /note="Description of Artificial Sequence: Synthetic oligonucleotide"
ugcuguuucagaaucaaau

SEQ ID NO: 1264 - RNA, 19 nt, Artificial Sequence
  source: /note="Description of Artificial Sequence: Synthetic oligonucleotide"
uucuuugacugcuguuuca

SEQ ID NO: 1265 - RNA, 19 nt, Artificial Sequence
  source: /note="Description of Artificial Sequence: Synthetic oligonucleotide"
guaguaugacaguucuuug

SEQ ID NO: 1266 - RNA, 19 nt, Artificial Sequence
  source: /note="Description of Artificial Sequence: Synthetic oligonucleotide"
ucuucuaaacuguaguaug

SEQ ID NO: 1267 - RNA, 19 nt, Artificial Sequence
  source: /note="Description of Artificial Sequence: Synthetic oligonucleotide"
guuuaaaucuucuaaacug

SEQ ID NO: 1268 - RNA, 19 nt, Artificial Sequence
  source: /note="Description of Artificial Sequence: Synthetic oligonucleotide"
uaaagguacuuguuguuua

SEQ ID NO: 1269 - RNA, 19 nt, Artificial Sequence
  source: /note="Description of Artificial Sequence: Synthetic oligonucleotide"
agcaauauaaagguacuug

SEQ ID NO: 1270 - RNA, 19 nt, Artificial Sequence
  source: /note="Description of Artificial Sequence: Synthetic oligonucleotide"
uaugacuguuacagcaaua

SEQ ID NO: 1271 - RNA, 19 nt, Artificial Sequence
  source: /note="Description of Artificial Sequence: Synthetic oligonucleotide"
uguagacucuaugacuguu

SEQ ID NO: 1272 - RNA, 19 nt, Artificial Sequence
  source: /note="Description of Artificial Sequence: Synthetic oligonucleotide"
aaauccaccuguagacucu

SEQ ID NO: 1273 - RNA, 19 nt, Artificial Sequence
  source: /note="Description of Artificial Sequence: Synthetic oligonucleotide"
cugccucuucagaaaaucc

SEQ ID NO: 1274 - RNA, 19 nt, Artificial Sequence
  source: /note="Description of Artificial Sequence: Synthetic oligonucleotide"
cagguauuucugccucuuc

SEQ ID NO: 1275 - RNA, 19 nt, Artificial Sequence
  source: /note="Description of Artificial Sequence: Synthetic oligonucleotide"
uuugaugccagguauuucu

SEQ ID NO: 1276 - RNA, 19 nt, Artificial Sequence
  source: /note="Description of Artificial Sequence: Synthetic oligonucleotide"
gagaggacauauuugaugc

SEQ ID NO: 1277 - RNA, 19 nt, Artificial Sequence
  source: /note="Description of Artificial Sequence: Synthetic oligonucleotide"
uuuguagggagagaggaca

SEQ ID NO: 1278 - RNA, 19 nt, Artificial Sequence
  source: /note="Description of Artificial Sequence: Synthetic oligonucleotide"
aggaguagcaaccaaauuc

SEQ ID NO: 1279 - RNA, 19 nt, Artificial Sequence
  source: /note="Description of Artificial Sequence: Synthetic oligonucleotide"
ucaggaaaagaggaguagc

SEQ ID NO: 1280 - RNA, 19 nt, Artificial Sequence
  source: /note="Description of Artificial Sequence: Synthetic oligonucleotide"
ccaggcuucaggaaaagag

SEQ ID NO: 1281 - RNA, 19 nt, Artificial Sequence
  source: /note="Description of Artificial Sequence: Synthetic oligonucleotide"
ugggauauggaaucccagg

SEQ ID NO: 1282 - RNA, 19 nt, Artificial Sequence
  source: /note="Description of Artificial Sequence: Synthetic oligonucleotide"
ugcaccuugaugggauaug

SEQ ID NO: 1283 - RNA, 19 nt, Artificial Sequence
  source: /note="Description of Artificial Sequence: Synthetic oligonucleotide"
uuaaccugcaccuugaugg

SEQ ID NO: 1284 - RNA, 19 nt, Artificial Sequence
  source: /note="Description of Artificial Sequence: Synthetic oligonucleotide"
caagcgaaucuuuaaccug

SEQ ID NO: 1285 - RNA, 19 nt, Artificial Sequence
  source: /note="Description of Artificial Sequence: Synthetic oligonucleotide"
uaccaacuggucaagcgaa

SEQ ID NO: 1286 - RNA, 19 nt, Artificial Sequence
  source: /note="Description of Artificial Sequence: Synthetic oligonucleotide"
gacuccuccuaccaacugg

SEQ ID NO: 1287 - RNA, 19 nt, Artificial Sequence
  source: /note="Description of Artificial Sequence: Synthetic oligonucleotide"
guguuacugggacuccucc

SEQ ID NO: 1288 - RNA, 19 nt, Artificial Sequence
  source: /note="Description of Artificial Sequence: Synthetic oligonucleotide"
ugugcauucaguguuacug

SEQ ID NO: 1289 - RNA, 19 nt, Artificial Sequence
  source: /note="Description of Artificial Sequence: Synthetic oligonucleotide"
aucaauuguuugugcauuc

SEQ ID NO: 1290 - RNA, 19 nt, Artificial Sequence
  source: /note="Description of Artificial Sequence: Synthetic oligonucleotide"
uugguuuacaucaauuguu

SEQ ID NO: 1291 - RNA, 19 nt, Artificial Sequence
  source: /note="Description of Artificial Sequence: Synthetic oligonucleotide"
ucagaugucucuugguuua

SEQ ID NO: 1292 - RNA, 19 nt, Artificial Sequence
  source: /note="Description of Artificial Sequence: Synthetic oligonucleotide"
cuuggauccaagucagaug

SEQ ID NO: 1293 - RNA, 19 nt, Artificial Sequence
  source: /note="Description of Artificial Sequence: Synthetic oligonucleotide"
uuacacuuuugcuuggauc

SEQ ID NO: 1294 - RNA, 19 nt, Artificial Sequence
  source: /note="Description of Artificial Sequence: Synthetic oligonucleotide"
aacacguguuacacuuuug

SEQ ID NO: 1295 - RNA, 19 nt, Artificial Sequence
  source: /note="Description of Artificial Sequence: Synthetic oligonucleotide"
uccaucaucaacacguguu

SEQ ID NO: 1296 - RNA, 19 nt, Artificial Sequence
  source: /note="Description of Artificial Sequence: Synthetic oligonucleotide"
aaaggaagcuacuccauca

SEQ ID NO: 1297 - RNA, 19 nt, Artificial Sequence
  source: /note="Description of Artificial Sequence: Synthetic oligonucleotide"
uaagcacaaaggaagcuac

SEQ ID NO: 1298 - RNA, 19 nt, Artificial Sequence
  source: /note="Description of Artificial Sequence: Synthetic oligonucleotide"
uccagaugggagauuaagc

SEQ ID NO: 1299 - RNA, 19 nt, Artificial Sequence
  source: /note="Description of Artificial Sequence: Synthetic oligonucleotide"
gcaccgucacuccagaugg

SEQ ID NO: 1300 - RNA, 19 nt, Artificial Sequence
  source: /note="Description of Artificial Sequence: Synthetic oligonucleotide"
uuaaacuccagcaccguca

SEQ ID NO: 1301 - RNA, 19 nt, Artificial Sequence
  source: /note="Description of Artificial Sequence: Synthetic oligonucleotide"
uuugacauuaaacuccagc

SEQ ID NO: 1302 - RNA, 19 nt, Artificial Sequence
  source: /note="Description of Artificial Sequence: Synthetic oligonucleotide"
uggagcaucaguuuugaca

SEQ ID NO: 1303 - RNA, 19 nt, Artificial Sequence
  source: /note="Description of Artificial Sequence: Synthetic oligonucleotide"
cuggaagaucuggagcauc

SEQ ID NO: 1304 - RNA, 19 nt, Artificial Sequence
  source: /note="Description of Artificial Sequence: Synthetic oligonucleotide"
uuuucuucuggaagaucug

SEQ ID NO: 1305 - RNA, 19 nt, Artificial Sequence
  source: /note="Description of Artificial Sequence: Synthetic oligonucleotide"
uucccuggccugauuuucu

SEQ ID NO: 1306 - RNA, 19 nt, Artificial Sequence
  source: /note="Description of Artificial Sequence: Synthetic oligonucleotide"
ucgguaaccuucccuggcc

SEQ ID NO: 1307 - RNA, 19 nt, Artificial Sequence
  source: /note="Description of Artificial Sequence: Synthetic oligonucleotide"
uaugcuauugcucgguaac

SEQ ID NO: 1308 - RNA, 19 nt, Artificial Sequence
  source: /note="Description of Artificial Sequence: Synthetic oligonucleotide"
ugagagaugaguaugcuau

SEQ ID NO: 1309 - RNA, 19 nt, Artificial Sequence
  source: /note="Description of Artificial Sequence: Synthetic oligonucleotide"
uuuggcugagagaugagua

SEQ ID NO: 1310 - RNA, 19 nt, Artificial Sequence
  source: /note="Description of Artificial Sequence: Synthetic oligonucleotide"
auauaaagguaacuuuggc

SEQ ID NO: 1311 - RNA, 19 nt, Artificial Sequence
  source: /note="Description of Artificial Sequence: Synthetic oligonucleotide"
aguccaaucaauauaaagg

SEQ ID NO: 1312 - RNA, 19 nt, Artificial Sequence
  source: /note="Description of Artificial Sequence: Synthetic oligonucleotide"
uaugguuaucaguccaauc

SEQ ID NO: 1313 - RNA, 19 nt, Artificial Sequence
  source: /note="Description of Artificial Sequence: Synthetic oligonucleotide"
aaagccuuaugguuaucag

SEQ ID NO: 1314 - RNA, 19 nt, Artificial Sequence
  source: /note="Description of Artificial Sequence: Synthetic oligonucleotide"
ucucccacuagcaaagccu

SEQ ID NO: 1315 - RNA, 19 nt, Artificial Sequence
  source: /note="Description of Artificial Sequence: Synthetic oligonucleotide"
uauucagauguucucccac

SEQ ID NO: 1316 - RNA, 19 nt, Artificial Sequence
  source: /note="Description of Artificial Sequence: Synthetic oligonucleotide"
uaacaauaauauucagaug

SEQ ID NO: 1317 - RNA, 19 nt, Artificial Sequence
  source: /note="Description of Artificial Sequence: Synthetic oligonucleotide"
uuuggggguaacaauaaua

SEQ ID NO: 1318 - RNA, 19 nt, Artificial Sequence
  source: /note="Description of Artificial Sequence: Synthetic oligonucleotide"
caauauaugggcuuuuggg

SEQ ID NO: 1319 - RNA, 19 nt, Artificial Sequence
  source: /note="Description of Artificial Sequence: Synthetic oligonucleotide"
ucaauauaugggcuuuugg

SEQ ID NO: 1320 - RNA, 19 nt, Artificial Sequence
  source: /note="Description of Artificial Sequence: Synthetic oligonucleotide"
gucaauauaugggcuuuug

SEQ ID NO: 1321 - RNA, 19 nt, Artificial Sequence
  source: /note="Description of Artificial Sequence: Synthetic oligonucleotide"
ugucaauauaugggcuuuu

SEQ ID NO: 1322 - RNA, 19 nt, Artificial Sequence
  source: /note="Description of Artificial Sequence: Synthetic oligonucleotide"
uugucaauauaugggcuuu

SEQ ID NO: 1323 - RNA, 19 nt, Artificial Sequence
  source: /note="Description of Artificial Sequence: Synthetic oligonucleotide"
uuugucaauauaugggcuu

SEQ ID NO: 1324 - RNA, 19 nt, Artificial Sequence
  source: /note="Description of Artificial Sequence: Synthetic oligonucleotide"
uuuugucaauauaugggcu

SEQ ID NO: 1325 - RNA, 19 nt, Artificial Sequence
  source: /note="Description of Artificial Sequence: Synthetic oligonucleotide"
auuuugucaauauaugggc

SEQ ID NO: 1326 - RNA, 19 nt, Artificial Sequence
  source: /note="Description of Artificial Sequence: Synthetic oligonucleotide"
uauuuugucaauauauggg

SEQ ID NO: 1327 - RNA, 19 nt, Artificial Sequence
  source: /note="Description of Artificial Sequence: Synthetic oligonucleotide"
uuauuuugucaauauaugg

SEQ ID NO: 1328 - RNA, 19 nt, Artificial Sequence
  source: /note="Description of Artificial Sequence: Synthetic oligonucleotide"
guuauuuugucaauauaug

SEQ ID NO: 1329 - RNA, 19 nt, Artificial Sequence
  source: /note="Description of Artificial Sequence: Synthetic oligonucleotide"
aguuauuuugucaauauau

SEQ ID NO: 1330 - RNA, 19 nt, Artificial Sequence
  source: /note="Description of Artificial Sequence: Synthetic oligonucleotide"
gaguuauuuugucaauaua

SEQ ID NO: 1331 - RNA, 19 nt, Artificial Sequence
  source: /note="Description of Artificial Sequence: Synthetic oligonucleotide"
ugaguuauuuugucaauau

SEQ ID NO: 1332 - RNA, 19 nt, Artificial Sequence
  source: /note="Description of Artificial Sequence: Synthetic oligonucleotide"
gugaguuauuuugucaaua

SEQ ID NO: 1333 - RNA, 19 nt, Artificial Sequence
  source: /note="Description of Artificial Sequence: Synthetic oligonucleotide"
agugaguuauuuugucaau

SEQ ID NO: 1334 - RNA, 19 nt, Artificial Sequence
  source: /note="Description of Artificial Sequence: Synthetic oligonucleotide"
uagugaguuauuuugucaa

SEQ ID NO: 1335 - RNA, 19 nt, Artificial Sequence
  source: /note="Description of Artificial Sequence: Synthetic oligonucleotide"
auagugaguuauuuuguca

SEQ ID NO: 1336 - RNA, 19 nt, Artificial Sequence
  source: /note="Description of Artificial Sequence: Synthetic oligonucleotide"
uauagugaguuauuuuguc

SEQ ID NO: 1337 - RNA, 19 nt, Artificial Sequence
  source: /note="Description of Artificial Sequence: Synthetic oligonucleotide"
aauuauagugaguuauuuu

SEQ ID NO: 1338 - RNA, 19 nt, Artificial Sequence
  source: /note="Description of Artificial Sequence: Synthetic oligonucleotide"
uaauuauagugaguuauuu

SEQ ID NO: 1339 - RNA, 19 nt, Artificial Sequence
  source: /note="Description of Artificial Sequence: Synthetic oligonucleotide"
guaauuauagugaguuauu

SEQ ID NO: 1340 - RNA, 19 nt, Artificial Sequence
  source: /note="Description of Artificial Sequence: Synthetic oligonucleotide"
aguaauuauagugaguuau

SEQ ID NO: 1341 - RNA, 19 nt, Artificial Sequence
  source: /note="Description of Artificial Sequence: Synthetic oligonucleotide"
caaguaauuauagugaguu

SEQ ID NO: 1342 - RNA, 19 nt, Artificial Sequence
  source: /note="Description of Artificial Sequence: Synthetic oligonucleotide"
ucaaguaauuauagugagu

SEQ ID NO: 1343 - RNA, 19 nt, Artificial Sequence
  source: /note="Description of Artificial Sequence: Synthetic oligonucleotide"
aucaaguaauuauagugag

SEQ ID NO: 1344 - RNA, 19 nt, Artificial Sequence
  source: /note="Description of Artificial Sequence: Synthetic oligonucleotide"
aaucaaguaauuauaguga

SEQ ID NO: 1345 - RNA, 19 nt, Artificial Sequence
  source: /note="Description of Artificial Sequence: Synthetic oligonucleotide"
aaaaucaaguaauuauagu

SEQ ID NO: 1346 - RNA, 19 nt, Artificial Sequence
  source: /note="Description of Artificial Sequence: Synthetic oligonucleotide"
uaaaaucaaguaauuauag

SEQ ID NO: 1347 - RNA, 19 nt, Artificial Sequence
  source: /note="Description of Artificial Sequence: Synthetic oligonucleotide"
auaaaaucaaguaauuaua

SEQ ID NO: 1348 - RNA, 19 nt, Artificial Sequence
  source: /note="Description of Artificial Sequence: Synthetic oligonucleotide"
gauaaaaucaaguaauuau

SEQ ID NO: 1349 - RNA, 19 nt, Artificial Sequence
  source: /note="Description of Artificial Sequence: Synthetic oligonucleotide"
ggauaaaaucaaguaauua

SEQ ID NO: 1350 - RNA, 19 nt, Artificial Sequence
  source: /note="Description of Artificial Sequence: Synthetic oligonucleotide"
uggauaaaaucaaguaauu

SEQ ID NO: 1351 - RNA, 19 nt, Artificial Sequence
  source: /note="Description of Artificial Sequence: Synthetic oligonucleotide"
uuggauaaaaucaaguaau

SEQ ID NO: 1352 - RNA, 19 nt, Artificial Sequence
  source: /note="Description of Artificial Sequence: Synthetic oligonucleotide"
uaauuuugcccuuggauaa

SEQ ID NO: 1353 - RNA, 19 nt, Artificial Sequence
  source: /note="Description of Artificial Sequence: Synthetic oligonucleotide"
ccaaaguggauaauuuugc

SEQ ID NO: 1354 - RNA, 19 nt, Artificial Sequence
  source: /note="Description of Artificial Sequence: Synthetic oligonucleotide"
ucucccucgugccaaagug

SEQ ID NO: 1355 - RNA, 19 nt, Artificial Sequence
  source: /note="Description of Artificial Sequence: Synthetic oligonucleotide"
ucugaaaauuucucccucg

SEQ ID NO: 1356 - RNA, 19 nt, Artificial Sequence
  source: /note="Description of Artificial Sequence: Synthetic oligonucleotide"
auaagaugcaucugaaaau

SEQ ID NO: 1357 - RNA, 19 nt, Artificial Sequence
  source: /note="Description of Artificial Sequence: Synthetic oligonucleotide"
uuauacuuugauaagaugc

SEQ ID NO: 1358 - RNA, 19 nt, Artificial Sequence
  source: /note="Description of Artificial Sequence: Synthetic oligonucleotide"
cuggaauguuuauacuuug

SEQ ID NO: 1359 - RNA, 19 nt, Artificial Sequence
  source: /note="Description of Artificial Sequence: Synthetic oligonucleotide"
uguucuguguuacuggaau

SEQ ID NO: 1360 - RNA, 19 nt, Artificial Sequence
  source: /note="Description of Artificial Sequence: Synthetic oligonucleotide"
gaaggaaccauguucugug

SEQ ID NO: 1361 - RNA, 19 nt, Artificial Sequence
  source: /note="Description of Artificial Sequence: Synthetic oligonucleotide"
aagucgggaugaaggaacc

SEQ ID NO: 1362 - RNA, 19 nt, Artificial Sequence
  source: /note="Description of Artificial Sequence: Synthetic oligonucleotide"
uaauagaccagaagucggg

SEQ ID NO: 1363 - RNA, 19 nt, Artificial Sequence
  source: /note="Description of Artificial Sequence: Synthetic oligonucleotide"
ugugacgauguaauagacc

SEQ ID NO: 1364 - RNA, 19 nt, Artificial Sequence
  source: /note="Description of Artificial Sequence: Synthetic oligonucleotide"
ucuguucuccugugacgau

SEQ ID NO: 1365 - RNA, 19 nt, Artificial Sequence
  source: /note="Description of Artificial Sequence: Synthetic oligonucleotide"
ucugcugucuguucuccug

SEQ ID NO: 1366 - RNA, 19 nt, Artificial Sequence
  source: /note="Description of Artificial Sequence: Synthetic oligonucleotide"
ucagacacuaauucugcug

SEQ ID NO: 1367 - RNA, 19 nt, Artificial Sequence
  source: /note="Description of Artificial Sequence: Synthetic oligonucleotide"
accagacugaaucagacac

SEQ ID NO: 1368 - RNA, 19 nt, Artificial Sequence
  source: /note="Description of Artificial Sequence: Synthetic oligonucleotide"
ucaauauuuaaccagacug

SEQ ID NO: 1369 - RNA, 19 nt, Artificial Sequence
  source: /note="Description of Artificial Sequence: Synthetic oligonucleotide"
uuuuucuucaauauuuaac

SEQ ID NO: 1370 - RNA, 19 nt, Artificial Sequence
  source: /note="Description of Artificial Sequence: Synthetic oligonucleotide"
cugguugccacauuuuucu

SEQ ID NO: 1371 - RNA, 19 nt, Artificial Sequence
  source: /note="Description of Artificial Sequence: Synthetic oligonucleotide"
ugaaccuggagcugguugc

SEQ ID NO: 1372 - RNA, 19 nt, Artificial Sequence
  source: /note="Description of Artificial Sequence: Synthetic oligonucleotide"
agacagaugaaccuggagc

SEQ ID NO: 1373 - RNA, 19 nt, Artificial Sequence
  source: /note="Description of Artificial Sequence: Synthetic oligonucleotide"
ucugcaucaggagacagau

SEQ ID NO: 1374 - RNA, 19 nt, Artificial Sequence
  source: /note="Description of Artificial Sequence: Synthetic oligonucleotide"
gagaauaugcaucugcauc

SEQ ID NO: 1375 - RNA, 19 nt, Artificial Sequence
  source: /note="Description of Artificial Sequence: Synthetic oligonucleotide"
uuuggccuggagaauaugc

SEQ ID NO: 1376 - RNA, 19 nt, Artificial Sequence
  source: /note="Description of Artificial Sequence: Synthetic oligonucleotide"
aagagacacaguuuggccu

SEQ ID NO: 1377 - RNA, 19 nt, Artificial Sequence
  source: /note="Description of Artificial Sequence: Synthetic oligonucleotide"
uugccauauuaagagacac

SEQ ID NO: 1378 - RNA, 19 nt, Artificial Sequence
  source: /note="Description of Artificial Sequence: Synthetic oligonucleotide"
auuccaguugccauauuaa

SEQ ID NO: 1379 - RNA, 19 nt, Artificial Sequence
  source: /note="Description of Artificial Sequence: Synthetic oligonucleotide"
ccaggaauccauuccaguu

SEQ ID NO: 1380 - RNA, 19 nt, Artificial Sequence
  source: /note="Description of Artificial Sequence: Synthetic oligonucleotide"
ugcuaaugccacccaggaa

SEQ ID NO: 1381 - RNA, 19 nt, Artificial Sequence
  source: /note="Description of Artificial Sequence: Synthetic oligonucleotide"
guccacugcugcuaaugcc

SEQ ID NO: 1382 - RNA, 19 nt, Artificial Sequence
  source: /note="Description of Artificial Sequence: Synthetic oligonucleotide"
auacacagcacuguccacu

SEQ ID NO: 1383 - RNA, 19 nt, Artificial Sequence
  source: /note="Description of Artificial Sequence: Synthetic oligonucleotide"
uuuggacuccauacacagc

SEQ ID NO: 1384 - RNA, 19 nt, Artificial Sequence
  source: /note="Description of Artificial Sequence: Synthetic oligonucleotide"
uuuggcuccucuuuggacu

SEQ ID NO: 1385 - RNA, 19 nt, Artificial Sequence
  source: /note="Description of Artificial Sequence: Synthetic oligonucleotide"
agggcuuuuuggcuccucu

SEQ ID NO: 1386 - RNA, 19 nt, Artificial Sequence
  source: /note="Description of Artificial Sequence: Synthetic oligonucleotide"
aauacucuuuccaagggcu

SEQ ID NO: 1387 - RNA, 19 nt, Artificial Sequence
  source: /note="Description of Artificial Sequence: Synthetic oligonucleotide"
uaagaauugaaauacucuu

SEQ ID NO: 1388 - RNA, 19 nt, Artificial Sequence
  source: /note="Description of Artificial Sequence: Synthetic oligonucleotide"
ucuucucuaagaauugaaa

SEQ ID NO: 1389 - RNA, 19 nt, Artificial Sequence
  source: /note="Description of Artificial Sequence: Synthetic oligonucleotide"
agcccagaucacucuucuc

SEQ ID NO: 1390 - RNA, 19 nt, Artificial Sequence
  source: /note="Description of Artificial Sequence: Synthetic oligonucleotide"
ugccccacagcccagauca

SEQ ID NO: 1391 - RNA, 19 nt, Artificial Sequence
  source: /note="Description of Artificial Sequence: Synthetic oligonucleotide"
ugaggccaccaccugcccc

SEQ ID NO: 1392 - RNA, 19 nt, Artificial Sequence
  source: /note="Description of Artificial Sequence: Synthetic oligonucleotide"
uuggcauuguugaggccac

SEQ ID NO: 1393 - RNA, 19 nt, Artificial Sequence
  source: /note="Description of Artificial Sequence: Synthetic oligonucleotide"
gaacacauuggcauuguug

SEQ ID NO: 1394 - RNA, 19 nt, Artificial Sequence
  source: /note="Description of Artificial Sequence: Synthetic oligonucleotide"
agcuagguggaacacauug

SEQ ID NO: 1395 - RNA, 19 nt, Artificial Sequence
  source: /note="Description of Artificial Sequence: Synthetic oligonucleotide"
agguaaguccagcuaggug

SEQ ID NO: 1396 - RNA, 19 nt, Artificial Sequence
  source: /note="Description of Artificial Sequence: Synthetic oligonucleotide"
uuagugaggaagguaaguc

SEQ ID NO: 1397 - RNA, 19 nt, Artificial Sequence
  source: /note="Description of Artificial Sequence: Synthetic oligonucleotide"
ucugcauuugcauuaguga

SEQ ID NO: 1398 - RNA, 19 nt, Artificial Sequence
  source: /note="Description of Artificial Sequence: Synthetic oligonucleotide"
uugggagucaucugcauuu

SEQ ID NO: 1399 - RNA, 19 nt, Artificial Sequence
  source: /note="Description of Artificial Sequence: Synthetic oligonucleotide"
uucaucauuuucuugggag

SEQ ID NO: 1400 - RNA, 19 nt, Artificial Sequence
  source: /note="Description of Artificial Sequence: Synthetic oligonucleotide"
ugagaauuucuuuacaagg

SEQ ID NO: 1401 - RNA, 19 nt, Artificial Sequence
  source: /note="Description of Artificial Sequence: Synthetic oligonucleotide"
ucuucuuggccugagaauu

SEQ ID NO: 1402 - RNA, 19 nt, Artificial Sequence
  source: /note="Description of Artificial Sequence: Synthetic oligonucleotide"
uuugcagcguucuucuugg

SEQ ID NO: 1403 - RNA, 19 nt, Artificial Sequence
  source: /note="Description of Artificial Sequence: Synthetic oligonucleotide"
ucuaucuucuuuugcagcg

SEQ ID NO: 1404 - RNA, 19 nt, Artificial Sequence
  source: /note="Description of Artificial Sequence: Synthetic oligonucleotide"
uauuucuucuaucuucuuu

SEQ ID NO: 1405 - RNA, 19 nt, Artificial Sequence
  source: /note="Description of Artificial Sequence: Synthetic oligonucleotide"
auauuuagcagcuauuucu

SEQ ID NO: 1406 - RNA, 19 nt, Artificial Sequence
  source: /note="Description of Artificial Sequence: Synthetic oligonucleotide"
aauguuuauauuuagcagc

SEQ ID NO: 1407 - RNA, 19 nt, Artificial Sequence
  source: /note="Description of Artificial Sequence: Synthetic oligonucleotide"
uuucuucacuacugaaugu

SEQ ID NO: 1408 - RNA, 19 nt, Artificial Sequence
  source: /note="Description of Artificial Sequence: Synthetic oligonucleotide"
aacaacauuucuucacuac

SEQ ID NO: 1409 - RNA, 19 nt, Artificial Sequence
  source: /note="Description of Artificial Sequence: Synthetic oligonucleotide"
cuccaucguaacaacauuu

SEQ ID NO: 1410 - RNA, 19 nt, Artificial Sequence
  source: /note="Description of Artificial Sequence: Synthetic oligonucleotide"
auuaacgcaggcuccaucg

SEQ ID NO: 1411 - RNA, 19 nt, Artificial Sequence
  source: /note="Description of Artificial Sequence: Synthetic oligonucleotide"
gguuucaucauuauuaacg

SEQ ID NO: 1412 - RNA, 19 nt, Artificial Sequence
  source: /note="Description of Artificial Sequence: Synthetic oligonucleotide"
ugcucacagguuucaucau

SEQ ID NO: 1413 - RNA, 19 nt, Artificial Sequence
  source: /note="Description of Artificial Sequence: Synthetic oligonucleotide"
ugcagcucgcugcucacag

SEQ ID NO: 1414 - RNA, 19 nt, Artificial Sequence
  source: /note="Description of Artificial Sequence: Synthetic oligonucleotide"
aacuaauccgugcagcucg

SEQ ID NO: 1415 - RNA, 19 nt, Artificial Sequence
  source: /note="Description of Artificial Sequence: Synthetic oligonucleotide"
cuuggcccuaaacuaaucc

SEQ ID NO: 1416 - RNA, 19 nt, Artificial Sequence
  source: /note="Description of Artificial Sequence: Synthetic oligonucleotide"
cuuugaugcaucuuggccc

SEQ ID NO: 1417 - RNA, 19 nt, Artificial Sequence
  source: /note="Description of Artificial Sequence: Synthetic oligonucleotide"
uucagugaaagcuuugaug

SEQ ID NO: 1418 - RNA, 19 nt, Artificial Sequence
  source: /note="Description of Artificial Sequence: Synthetic oligonucleotide"
cacaacauucagugaaagc

SEQ ID NO: 1419 - RNA, 19 nt, Artificial Sequence
  source: /note="Description of Artificial Sequence: Synthetic oligonucleotide"
cuugcgacgacacaacauu

SEQ ID NO: 1420 - RNA, 19 nt, Artificial Sequence
  source: /note="Description of Artificial Sequence: Synthetic oligonucleotide"
acggagcuggcuugcgacg

SEQ ID NO: 1421 - RNA, 19 nt, Artificial Sequence
  source: /note="Description of Artificial Sequence: Synthetic oligonucleotide"
agagauauuagcacggagc

SEQ ID NO: 1422 - RNA, 19 nt, Artificial Sequence
  source: /note="Description of Artificial Sequence: Synthetic oligonucleotide"
ucuuuaugagagauauuag

SEQ ID NO: 1423 - RNA, 19 nt, Artificial Sequence
  source: /note="Description of Artificial Sequence: Synthetic oligonucleotide"
uucccaauugcaugucuuu

SEQ ID NO: 1424 - RNA, 19 nt, Artificial Sequence
  source: /note="Description of Artificial Sequence: Synthetic oligonucleotide"
uguguagccuucccaauug

SEQ ID NO: 1425 - RNA, 19 nt, Artificial Sequence
  source: /note="Description of Artificial Sequence: Synthetic oligonucleotide"
cagggucuucauguguagc

SEQ ID NO: 1426 - RNA, 19 nt, Artificial Sequence
  source: /note="Description of Artificial Sequence: Synthetic oligonucleotide"
ugguaacagggucuucaug

SEQ ID NO: 1427 - RNA, 19 nt, Artificial Sequence
  source: /note="Description of Artificial Sequence: Synthetic oligonucleotide"
ucuggcuugcuuacuggua

SEQ ID NO: 1428 - RNA, 19 nt, Artificial Sequence
  source: /note="Description of Artificial Sequence: Synthetic oligonucleotide"
uccgaauuucuggcuugcu

SEQ ID NO: 1429 - RNA, 19 nt, Artificial Sequence
  source: /note="Description of Artificial Sequence: Synthetic oligonucleotide"
aaaauaacuccgaauuucu

SEQ ID NO: 1430 - RNA, 19 nt, Artificial Sequence
  source: /note="Description of Artificial Sequence: Synthetic oligonucleotide"
agcuuucuggaaaauaacu

SEQ ID NO: 1431 - RNA, 19 nt, Artificial Sequence
  source: /note="Description of Artificial Sequence: Synthetic oligonucleotide"
ucccacaaccagcuuucug

SEQ ID NO: 1432 - RNA, 19 nt, Artificial Sequence
  source: /note="Description of Artificial Sequence: Synthetic oligonucleotide"
aacaagaugaacuucccac

SEQ ID NO: 1433 - RNA, 19 nt, Artificial Sequence
  source: /note="Description of Artificial Sequence: Synthetic oligonucleotide"
ucuucugggaacaagauga

SEQ ID NO: 1434 - RNA, 19 nt, Artificial Sequence
  source: /note="Description of Artificial Sequence: Synthetic oligonucleotide"
ugcaacuguuuucuucugg

SEQ ID NO: 1435 - RNA, 19 nt, Artificial Sequence
  source: /note="Description of Artificial Sequence: Synthetic oligonucleotide"
guagggcaaacugcaacug

SEQ ID NO: 1436 - RNA, 19 nt, Artificial Sequence
  source: /note="Description of Artificial Sequence: Synthetic oligonucleotide"
aaucagguagggcaaacug

SEQ ID NO: 1437 - RNA, 19 nt, Artificial Sequence
  source: /note="Description of Artificial Sequence: Synthetic oligonucleotide"
aggugguuagagaaucagg

SEQ ID NO: 1438 - RNA, 19 nt, Artificial Sequence
  source: /note="Description of Artificial Sequence: Synthetic oligonucleotide"
cuugaauuucccagguggu

SEQ ID NO: 1439 - RNA, 19 nt, Artificial Sequence
  source: /note="Description of Artificial Sequence: Synthetic oligonucleotide"
ugccaacgccuugaauuuc

SEQ ID NO: 1440 - RNA, 19 nt, Artificial Sequence
  source: /note="Description of Artificial Sequence: Synthetic oligonucleotide"
aguguuugaaaugccaacg

SEQ ID NO: 1441 - RNA, 19 nt, Artificial Sequence
  source: /note="Description of Artificial Sequence: Synthetic oligonucleotide"
uauaccaguguuugaaaug

SEQ ID NO: 1442 - RNA, 19 nt, Artificial Sequence
  source: /note="Description of Artificial Sequence: Synthetic oligonucleotide"
guaucagcaacacauauac

SEQ ID NO: 1443 - RNA, 19 nt, Artificial Sequence
  source: /note="Description of Artificial Sequence: Synthetic oligonucleotide"
ugccuugacaguaucagca

SEQ ID NO: 1444 - RNA, 19 nt, Artificial Sequence
  source: /note="Description of Artificial Sequence: Synthetic oligonucleotide"
aacaccuuugccuugacag

SEQ ID NO: 1445 - RNA, 19 nt, Artificial Sequence
  source: /note="Description of Artificial Sequence: Synthetic oligonucleotide"
aagacaucuuugaacaccu

SEQ ID NO: 1446 - RNA, 19 nt, Artificial Sequence
  source: /note="Description of Artificial Sequence: Synthetic oligonucleotide"
uuccaggaagacaucuuug

SEQ ID NO: 1447 - RNA, 19 nt, Artificial Sequence
  source: /note="Description of Artificial Sequence: Synthetic oligonucleotide"
uauauucauuuccaggaag

SEQ ID NO: 1448 - RNA, 19 nt, Artificial Sequence
  source: /note="Description of Artificial Sequence: Synthetic oligonucleotide"
aacagaauaugguauauuc

SEQ ID NO: 1449 - RNA, 19 nt, Artificial Sequence
  source: /note="Description of Artificial Sequence: Synthetic oligonucleotide"
uccucguacaacagaauau

SEQ ID NO: 1450 - RNA, 19 nt, Artificial Sequence
  source: /note="Description of Artificial Sequence: Synthetic oligonucleotide"
auuggaucuguucuccucg

SEQ ID NO: 1451 - RNA, 19 nt, Artificial Sequence
  source: /note="Description of Artificial Sequence: Synthetic oligonucleotide"
cuuucaauuggaucuguuc

SEQ ID NO: 1452 - RNA, 19 nt, Artificial Sequence
  source: /note="Description of Artificial Sequence: Synthetic oligonucleotide"
guuguaaacaguuccuuuc

SEQ ID NO: 1453 - RNA, 19 nt, Artificial Sequence
  source: /note="Description of Artificial Sequence: Synthetic oligonucleotide"
uccuauaguuguaaacagu

SEQ ID NO: 1454 - RNA, 19 nt, Artificial Sequence
  source: /note="Description of Artificial Sequence: Synthetic oligonucleotide"
ucccagaaguccuauaguu

SEQ ID NO: 1455 - RNA, 19 nt, Artificial Sequence
  source: /note="Description of Artificial Sequence: Synthetic oligonucleotide"
aacacagaacugcauccca

SEQ ID NO: 1456 - RNA, 19 nt, Artificial Sequence
  source: /note="Description of Artificial Sequence: Synthetic oligonucleotide"
agacauuuuaacacagaac

SEQ ID NO: 1457 - RNA, 19 nt, Artificial Sequence
  source: /note="Description of Artificial Sequence: Synthetic oligonucleotide"
uccacagcagacauuuuaa

SEQ ID NO: 1458 - RNA, 19 nt, Artificial Sequence
  source: /note="Description of Artificial Sequence: Synthetic oligonucleotide"
gugcagauucccuccacag

SEQ ID NO: 1459 - RNA, 19 nt, Artificial Sequence
  source: /note="Description of Artificial Sequence: Synthetic oligonucleotide"
uuuccgaagugcagauucc

SEQ ID NO: 1460 - RNA, 19 nt, Artificial Sequence
  source: /note="Description of Artificial Sequence: Synthetic oligonucleotide"
ucaaugacugggcuuuccg

SEQ ID NO: 1461 - RNA, 19 nt, Artificial Sequence
  source: /note="Description of Artificial Sequence: Synthetic oligonucleotide"
ccugaugaucaaugacugg

SEQ ID NO: 1462 - RNA, 19 nt, Artificial Sequence
  source: /note="Description of Artificial Sequence: Synthetic oligonucleotide"
aggacuuugugcccugaug

SEQ ID NO: 1463 - RNA, 19 nt, Artificial Sequence
  source: /note="Description of Artificial Sequence: Synthetic oligonucleotide"
auuuggaggacuuugugcc

SEQ ID NO: 1464 - RNA, 19 nt, Artificial Sequence
  source: /note="Description of Artificial Sequence: Synthetic oligonucleotide"
uuucuggcgcacacauuug

SEQ ID NO: 1465 - RNA, 19 nt, Artificial Sequence
  source: /note="Description of Artificial Sequence: Synthetic oligonucleotide"
gcccucuacuuucuggcgc

SEQ ID NO: 1466 - RNA, 19 nt, Artificial Sequence
  source: /note="Description of Artificial Sequence: Synthetic oligonucleotide"
acuggaggagcccucuacu

SEQ ID NO: 1467 - RNA, 19 nt, Artificial Sequence
  source: /note="Description of Artificial Sequence: Synthetic oligonucleotide"
gucaccaagugacuggagg

SEQ ID NO: 1468 - RNA, 19 nt, Artificial Sequence
  source: /note="Description of Artificial Sequence: Synthetic oligonucleotide"
agugaaugucaccaaguga

SEQ ID NO: 1469 - RNA, 19 nt, Artificial Sequence
  source: /note="Description of Artificial Sequence: Synthetic oligonucleotide"
agaggaagcacagugaaug

SEQ ID NO: 1470 - RNA, 19 nt, Artificial Sequence
  source: /note="Description of Artificial Sequence: Synthetic oligonucleotide"
guugugaaggccaauuucc

SEQ ID NO: 1471 - RNA, 19 nt, Artificial Sequence
  source: /note="Description of Artificial Sequence: Synthetic oligonucleotide"
aaaaauugauguugugaag

SEQ ID NO: 1472 - RNA, 19 nt, Artificial Sequence
  source: /note="Description of Artificial Sequence: Synthetic oligonucleotide"
aagucuccagugaaaaauu

SEQ ID NO: 1473 - RNA, 19 nt, Artificial Sequence
  source: /note="Description of Artificial Sequence: Synthetic oligonucleotide"
uuccaaaccaagucuccag

SEQ ID NO: 1474 - RNA, 19 nt, Artificial Sequence
  source: /note="Description of Artificial Sequence: Synthetic oligonucleotide"
aagauuucuuuuccaaacc

SEQ ID NO: 1475 - RNA, 19 nt, Artificial Sequence
  source: /note="Description of Artificial Sequence: Synthetic oligonucleotide"
uaauguuuuuacuaagauu

SEQ ID NO: 1476 - RNA, 19 nt, Artificial Sequence
  source: /note="Description of Artificial Sequence: Synthetic oligonucleotide"
caccacucguaauguuuuu

SEQ ID NO: 1477 - RNA, 19 nt, Artificial Sequence
  source: /note="Description of Artificial Sequence: Synthetic oligonucleotide"
acaccuucuggcaccacuc

SEQ ID NO: 1478 - RNA, 19 nt, Artificial Sequence
  source: /note="Description of Artificial Sequence: Synthetic oligonucleotide"
uucccuuuugacaccuucu

SEQ ID NO: 1479 - RNA, 19 nt, Artificial Sequence
  source: /note="Description of Artificial Sequence: Synthetic oligonucleotide"
auagcuuucccuuuugaca

SEQ ID NO: 1480 - RNA, 19 nt, Artificial Sequence
  source: /note="Description of Artificial Sequence: Synthetic oligonucleotide"
aaaguaacaccagaauagc

SEQ ID NO: 1481 - RNA, 19 nt, Artificial Sequence
  source: /note="Description of Artificial Sequence: Synthetic oligonucleotide"
cuaggauccaaaguaacac

SEQ ID NO: 1482 - RNA, 19 nt, Artificial Sequence
  source: /note="Description of Artificial Sequence: Synthetic oligonucleotide"
auaaauaccccuaggaucc

SEQ ID NO: 1483 - RNA, 19 nt, Artificial Sequence
  source: /note="Description of Artificial Sequence: Synthetic oligonucleotide"
uaaugguaccauaaauacc

SEQ ID NO: 1484 - RNA, 19 nt, Artificial Sequence
  source: /note="Description of Artificial Sequence: Synthetic oligonucleotide"
uuucgucugcuaaugguac

SEQ ID NO: 1485 - RNA, 19 nt, Artificial Sequence
  source: /note="Description of Artificial Sequence: Synthetic oligonucleotide"
ugggaacuccuuucgucug

SEQ ID NO: 1486 - RNA, 19 nt, Artificial Sequence
  source: /note="Description of Artificial Sequence: Synthetic oligonucleotide"
auccuguaugggaacuccu

SEQ ID NO: 1487 - RNA, 19 nt, Artificial Sequence
  source: /note="Description of Artificial Sequence: Synthetic oligonucleotide"
ucuaaggguauccuguaug

SEQ ID NO: 1488 - RNA, 19 nt, Artificial Sequence
  source: /note="Description of Artificial Sequence: Synthetic oligonucleotide"
uuuggggaccaaaucuaag

SEQ ID NO: 1489 - RNA, 19 nt, Artificial Sequence
  source: /note="Description of Artificial Sequence: Synthetic oligonucleotide"
uugauuucuguuuugggga

SEQ ID NO: 1490 - RNA, 19 nt, Artificial Sequence
  source: /note="Description of Artificial Sequence: Synthetic oligonucleotide"
aaauccuuuugauuucugu

SEQ ID NO: 1491 - RNA, 19 nt, Artificial Sequence
  source: /note="Description of Artificial Sequence: Synthetic oligonucleotide"
uuuacacucaaaauccuuu

SEQ ID NO: 1492 - RNA, 19 nt, Artificial Sequence
  source: /note="Description of Artificial Sequence: Synthetic oligonucleotide"
caagcaguccuuuuacacu

SEQ ID NO: 1493 - RNA, 19 nt, Artificial Sequence
  source: /note="Description of Artificial Sequence: Synthetic oligonucleotide"
ucaccuacaagcaguccuu

SEQ ID NO: 1494 - RNA, 19 nt, Artificial Sequence
  source: /note="Description of Artificial Sequence: Synthetic oligonucleotide"
cagacaagaucucaccuac

SEQ ID NO: 1495 - RNA, 19 nt, Artificial Sequence
  source: /note="Description of Artificial Sequence: Synthetic oligonucleotide"
uuagaacugcagacaagau

SEQ ID NO: 1496 - RNA, 19 nt, Artificial Sequence
  source: /note="Description of Artificial Sequence: Synthetic oligonucleotide"
ugccuuccugacuuagaac

SEQ ID NO: 1497 - RNA, 19 nt, Artificial Sequence
  source: /note="Description of Artificial Sequence: Synthetic oligonucleotide"
uuaggauauugaugccuuc

SEQ ID NO: 1498 - RNA, 19 nt, Artificial Sequence
  source: /note="Description of Artificial Sequence: Synthetic oligonucleotide"
agguggguuaggauauuga

SEQ ID NO: 1499 - RNA, 19 nt, Artificial Sequence
  source: /note="Description of Artificial Sequence: Synthetic oligonucleotide"
acucccuuuggggaggugg

SEQ ID NO: 1500 - RNA, 19 nt, Artificial Sequence
  source: /note="Description of Artificial Sequence: Synthetic oligonucleotide"
cucugcacucccuuugggg

SEQ ID NO: 1501 - RNA, 19 nt, Artificial Sequence
  source: /note="Description of Artificial Sequence: Synthetic oligonucleotide"
aucagcuccgccucugcac

SEQ ID NO: 1502 - RNA, 19 nt, Artificial Sequence
  source: /note="Description of Artificial Sequence: Synthetic oligonucleotide"
gacaacgcucaucagcucc

SEQ ID NO: 1503 - RNA, 19 nt, Artificial Sequence
  source: /note="Description of Artificial Sequence: Synthetic oligonucleotide"
auagaauacugggacaacg

SEQ ID NO: 1504 - RNA, 19 nt, Artificial Sequence
  source: /note="Description of Artificial Sequence: Synthetic oligonucleotide"
gaaaaacauagaauacugg

SEQ ID NO: 1505 - RNA, 19 nt, Artificial Sequence
  source: /note="Description of Artificial Sequence: Synthetic oligonucleotide"
uuuccagguagugaaaaac

SEQ ID NO: 1506 - RNA, 19 nt, Artificial Sequence
  source: /note="Description of Artificial Sequence: Synthetic oligonucleotide"
augauuuccuguuuccagg

SEQ ID NO: 1507 - RNA, 19 nt, Artificial Sequence
  source: /note="Description of Artificial Sequence: Synthetic oligonucleotide"
ucagaaugaaaaauguucc

SEQ ID NO: 1508 - RNA, 19 nt, Artificial Sequence
  source: /note="Description of Artificial Sequence: Synthetic oligonucleotide"
caauuaaugggucagaaug

SEQ ID NO: 1509 - RNA, 19 nt, Artificial Sequence
  source: /note="Description of Artificial Sequence: Synthetic oligonucleotide"
ucugcuuuucaauuaaugg

SEQ ID NO: 1510 - RNA, 19 nt, Artificial Sequence
  source: /note="Description of Artificial Sequence: Synthetic oligonucleotide"
uuucuucaguuucugcuuu

SEQ ID NO: 1511 - RNA, 19 nt, Artificial Sequence
  source: /note="Description of Artificial Sequence: Synthetic oligonucleotide"
uuuaauuuuuucuucaguu

SEQ ID NO: 1512 - RNA, 19 nt, Artificial Sequence
  source: /note="Description of Artificial Sequence: Synthetic oligonucleotide"
ucccuucuuuuaauuuuuu

SEQ ID NO: 1513 - RNA, 19 nt, Artificial Sequence
  source: /note="Description of Artificial Sequence: Synthetic oligonucleotide"
cauaaugcucaacaucccu

SEQ ID NO: 1514 - RNA, 19 nt, Artificial Sequence
  source: /note="Description of Artificial Sequence: Synthetic oligonucleotide"
ucuguaggacauaaugcuc

SEQ ID NO: 1515 - RNA, 19 nt, Artificial Sequence
  source: /note="Description of Artificial Sequence: Synthetic oligonucleotide"
ucagcauuucuguaggaca

SEQ ID NO: 1516 - RNA, 19 nt, Artificial Sequence
  source: /note="Description of Artificial Sequence: Synthetic oligonucleotide"
uguaagaguagucagcauu

SEQ ID NO: 1517 - RNA, 19 nt, Artificial Sequence
  source: /note="Description of Artificial Sequence: Synthetic oligonucleotide"
uccacacacuguaagagua

SEQ ID NO: 1518 - RNA, 19 nt, Artificial Sequence
  source: /note="Description of Artificial Sequence: Synthetic oligonucleotide"
uuccacccuuccacacacu

SEQ ID NO: 1519 - RNA, 19 nt, Artificial Sequence
  source: /note="Description of Artificial Sequence: Synthetic oligonucleotide"
agugcuagcacuuccaccc

SEQ ID NO: 1520 - RNA, 19 nt, Artificial Sequence
  source: /note="Description of Artificial Sequence: Synthetic oligonucleotide"
cuguuaaccaagugcuagc

SEQ ID NO: 1521 - RNA, 19 nt, Artificial Sequence
  source: /note="Description of Artificial Sequence: Synthetic oligonucleotide"
aaagcaaaagcuguuaacc

SEQ ID NO: 1522 - RNA, 19 nt, Artificial Sequence
  source: /note="Description of Artificial Sequence: Synthetic oligonucleotide"
uccaaguacucuuaaagca

SEQ ID NO: 1523 - RNA, 19 nt, Artificial Sequence
  source: /note="Description of Artificial Sequence: Synthetic oligonucleotide"
uauuuacuuguccaaguac

SEQ ID NO: 1524 - RNA, 19 nt, Artificial Sequence
  source: /note="Description of Artificial Sequence: Synthetic oligonucleotide"
cuacguauuuauuuacuug

SEQ ID NO: 1525 - RNA, 19 nt, Artificial Sequence
  source: /note="Description of Artificial Sequence: Synthetic oligonucleotide"
uucugcucuacguauuuau

SEQ ID NO: 1526 - RNA, 19 nt, Artificial Sequence
  source: /note="Description of Artificial Sequence: Synthetic oligonucleotide"
uugaauuuugguucugcuc

SEQ ID NO: 1527 - RNA, 19 nt, Artificial Sequence
  source: /note="Description of Artificial Sequence: Synthetic oligonucleotide"
aagaauuacaaauugaauu

SEQ ID NO: 1528 - RNA, 19 nt, Artificial Sequence
  source: /note="Description of Artificial Sequence: Synthetic oligonucleotide"
agccacaauaaagaauuac

SEQ ID NO: 1529 - RNA, 19 nt, Artificial Sequence
  source: /note="Description of Artificial Sequence: Synthetic oligonucleotide"
auucucaacuagccacaau

SEQ ID NO: 1530 - RNA, 19 nt, Artificial Sequence
  source: /note="Description of Artificial Sequence: Synthetic oligonucleotide"
auugauaauucucaacuag

SEQ ID NO: 1531 - RNA, 19 nt, Artificial Sequence
  source: /note="Description of Artificial Sequence: Synthetic oligonucleotide"
uccauuaucuaauugauaa

SEQ ID NO: 1532 - RNA, 19 nt, Artificial Sequence
  source: /note="Description of Artificial Sequence: Synthetic oligonucleotide"
uuuccuugaaagauccauu

SEQ ID NO: 1533 - RNA, 19 nt, Artificial Sequence
  source: /note="Description of Artificial Sequence: Synthetic oligonucleotide"
ugugaauuuuccuugaaag

SEQ ID NO: 1534 - RNA, 19 nt, Artificial Sequence
  source: /note="Description of Artificial Sequence: Synthetic oligonucleotide"
uugguugauacugugaauu

SEQ ID NO: 1535 - RNA, 19 nt, Artificial Sequence
  source: /note="Description of Artificial Sequence: Synthetic oligonucleotide"
uaauuuuauugguugauac

SEQ ID NO: 1536 - RNA, 19 nt, Artificial Sequence
  source: /note="Description of Artificial Sequence: Synthetic oligonucleotide"
caagguacccuguaauuuu

SEQ ID NO: 1537 - RNA, 19 nt, Artificial Sequence
  source: /note="Description of Artificial Sequence: Synthetic oligonucleotide"
ucaacaggcaagguacccu

SEQ ID NO: 1538 - RNA, 19 nt, Artificial Sequence
  source: /note="Description of Artificial Sequence: Synthetic oligonucleotide"
uguucucucgggcuucaac

SEQ ID NO: 1539 - RNA, 19 nt, Artificial Sequence
  source: /note="Description of Artificial Sequence: Synthetic oligonucleotide"
auauaagcuguucucucgg

SEQ ID NO: 1540 - RNA, 19 nt, Artificial Sequence
  source: /note="Description of Artificial Sequence: Synthetic oligonucleotide"
aaggcuguaagauauaagc

SEQ ID NO: 1541 - RNA, 19 nt, Artificial Sequence
  source: /note="Description of Artificial Sequence: Synthetic oligonucleotide"
ucacaguaaaggcuguaag

SEQ ID NO: 1542 - RNA, 19 nt, Artificial Sequence
  source: /note="Description of Artificial Sequence: Synthetic oligonucleotide"
ucgaaagccuuucuaauuc

SEQ ID NO: 1543 - RNA, 19 nt, Artificial Sequence
  source: /note="Description of Artificial Sequence: Synthetic oligonucleotide"
ggggcauauaucgaaagcc

SEQ ID NO: 1544 - RNA, 19 nt, Artificial Sequence
  source: /note="Description of Artificial Sequence: Synthetic oligonucleotide"
ucaccagggggcauauauc

SEQ ID NO: 1545 - RNA, 19 nt, Artificial Sequence
  source: /note="Description of Artificial Sequence: Synthetic oligonucleotide"
agcugugucgauuuucacc

SEQ ID NO: 1546 - RNA, 19 nt, Artificial Sequence
  source: /note="Description of Artificial Sequence: Synthetic oligonucleotide"
uuuaauuagagcugugucg

SEQ ID NO: 1547 - RNA, 19 nt, Artificial Sequence
  source: /note="Description of Artificial Sequence: Synthetic oligonucleotide"
ugucagcuuuaauuagagc

SEQ ID NO: 1548 - RNA, 19 nt, Artificial Sequence
  source: /note="Description of Artificial Sequence: Synthetic oligonucleotide"
ucaagcagaaaguugucag

SEQ ID NO: 1549 - RNA, 19 nt, Artificial Sequence
  source: /note="Description of Artificial Sequence: Synthetic oligonucleotide"
uguauuuucaagcagaaag

SEQ ID NO: 1550 - RNA, 19 nt, Artificial Sequence
  source: /note="Description of Artificial Sequence: Synthetic oligonucleotide"
ugggcuggcaguguauuuu

SEQ ID NO: 1551 - RNA, 19 nt, Artificial Sequence
  source: /note="Description of Artificial Sequence: Synthetic oligonucleotide"
uguaaaggugcucugggcu

SEQ ID NO: 1552 - RNA, 19 nt, Artificial Sequence
  source: /note="Description of Artificial Sequence: Synthetic oligonucleotide"
auggccaauguaaaggugc

SEQ ID NO: 1553 - RNA, 19 nt, Artificial Sequence
  source: /note="Description of Artificial Sequence: Synthetic oligonucleotide"
acgcagaaauggccaaugu

SEQ ID NO: 1554 - RNA, 19 nt, Artificial Sequence
  source: /note="Description of Artificial Sequence: Synthetic oligonucleotide"
agggaaagagcauacgcag

SEQ ID NO: 1555 - RNA, 19 nt, Artificial Sequence
  source: /note="Description of Artificial Sequence: Synthetic oligonucleotide"
uuuuaucucccagggaaag

SEQ ID NO: 1556 - RNA, 19 nt, Artificial Sequence
  source: /note="Description of Artificial Sequence: Synthetic oligonucleotide"
ugugggugaguuuuaucuc

SEQ ID NO: 1557 - RNA, 19 nt, Artificial Sequence
  source: /note="Description of Artificial Sequence: Synthetic oligonucleotide"
aacgaaacugugggugagu

SEQ ID NO: 1558 - RNA, 19 nt, Artificial Sequence
  source: /note="Description of Artificial Sequence: Synthetic oligonucleotide"
aaacaauugaacgaaacug

SEQ ID NO: 1559 - RNA, 19 nt, Artificial Sequence
  source: /note="Description of Artificial Sequence: Synthetic oligonucleotide"
uucaaagcugaaacaauug

SEQ ID NO: 1560 - RNA, 19 nt, Artificial Sequence
  source: /note="Description of Artificial Sequence: Synthetic oligonucleotide"
aaagcuucucucuucaaag

SEQ ID NO: 1561 - RNA, 19 nt, Artificial Sequence
  source: /note="Description of Artificial Sequence: Synthetic oligonucleotide"
uuuaaccaaagcuucucuc

SEQ ID NO: 1562 - RNA, 19 nt, Artificial Sequence
  source: /note="Description of Artificial Sequence: Synthetic oligonucleotide"
uggguggauuaccuuuaac

SEQ ID NO: 1563 - RNA, 19 nt, Artificial Sequence
  source: /note="Description of Artificial Sequence: Synthetic oligonucleotide"
aacgauaaauggguggauu

SEQ ID NO: 1564 - RNA, 19 nt, Artificial Sequence
  source: /note="Description of Artificial Sequence: Synthetic oligonucleotide"
uuuccaaaaacgauaaaug

SEQ ID NO: 1565 - RNA, 19 nt, Artificial Sequence
  source: /note="Description of Artificial Sequence: Synthetic oligonucleotide"
ugaagauugucuuuccaaa

SEQ ID NO: 1566 - RNA, 19 nt, Artificial Sequence
  source: /note="Description of Artificial Sequence: Synthetic oligonucleotide"
ugucuuuaugcugaagauu

SEQ ID NO: 1567 - RNA, 19 nt, Artificial Sequence
  source: /note="Description of Artificial Sequence: Synthetic oligonucleotide"
guacagagcugucuuuaug

SEQ ID NO: 1568 - RNA, 19 nt, Artificial Sequence
  source: /note="Description of Artificial Sequence: Synthetic oligonucleotide"
accaguguuagguacagag

SEQ ID NO: 1569 - RNA, 19 nt, Artificial Sequence
  source: /note="Description of Artificial Sequence: Synthetic oligonucleotide"
auacgugccguaccagugu

SEQ ID NO: 1570 - RNA, 19 nt, Artificial Sequence
  source: /note="Description of Artificial Sequence: Synthetic oligonucleotide"
uguuucuaccauacgugcc

SEQ ID NO: 1571 - RNA, 19 nt, Artificial Sequence
  source: /note="Description of Artificial Sequence: Synthetic oligonucleotide"
auaggcaguuguuucuacc

SEQ ID NO: 1572 - RNA, 19 nt, Artificial Sequence
  source: /note="Description of Artificial Sequence: Synthetic oligonucleotide"
aguaaagcauaggcaguug

SEQ ID NO: 1573 - RNA, 19 nt, Artificial Sequence
  source: /note="Description of Artificial Sequence: Synthetic oligonucleotide"
uucagacuggugaguaaag

SEQ ID NO: 1574 - RNA, 19 nt, Artificial Sequence
  source: /note="Description of Artificial Sequence: Synthetic oligonucleotide"
auaucuuucaaguucagac

SEQ ID NO: 1575 - RNA, 19 nt, Artificial Sequence
  source: /note="Description of Artificial Sequence: Synthetic oligonucleotide"
uaauuuauaucuuucaagu

SEQ ID NO: 1576 - RNA, 19 nt, Artificial Sequence
  source: /note="Description of Artificial Sequence: Synthetic oligonucleotide"
uggguuaacauaauuuaua

SEQ ID NO: 1577 - RNA, 19 nt, Artificial Sequence
  source: /note="Description of Artificial Sequence: Synthetic oligonucleotide"
auuugaugacuggguuaac

SEQ ID NO: 1578 - RNA, 19 nt, Artificial Sequence
  source: /note="Description of Artificial Sequence: Synthetic oligonucleotide"
ucugauagccauuugauga

SEQ ID NO: 1579 - RNA, 19 nt, Artificial Sequence
  source: /note="Description of Artificial Sequence: Synthetic oligonucleotide"
uaccucugcucuucugaua

SEQ ID NO: 1580 - RNA, 19 nt, Artificial Sequence
  source: /note="Description of Artificial Sequence: Synthetic oligonucleotide"
aagccaccuccauaccucu

SEQ ID NO: 1581 - RNA, 19 nt, Artificial Sequence
  source: /note="Description of Artificial Sequence: Synthetic oligonucleotide"
guugaauaaaagccaccuc

SEQ ID NO: 1582 - RNA, 19 nt, Artificial Sequence
  source: /note="Description of Artificial Sequence: Synthetic oligonucleotide"
uuguguccuggguugaaua

SEQ ID NO: 1583 - RNA, 19 nt, Artificial Sequence
  source: /note="Description of Artificial Sequence: Synthetic oligonucleotide"
auggcauugauuguguccu

SEQ ID NO: 1584 - RNA, 19 nt, Artificial Sequence
  source: /note="Description of Artificial Sequence: Synthetic oligonucleotide"
cccucaauggcauugauug

SEQ ID NO: 1585 - RNA, 19 nt, Artificial Sequence
  source: /note="Description of Artificial Sequence: Synthetic oligonucleotide"
uuccgucaggcccucaaug

SEQ ID NO: 1586 - RNA, 19 nt, Artificial Sequence
  source: /note="Description of Artificial Sequence: Synthetic oligonucleotide"
ccaggagugaauauuccgu

SEQ ID NO: 1587 - RNA, 19 nt, Artificial Sequence
  source: /note="Description of Artificial Sequence: Synthetic oligonucleotide"
uuguuuaaccaggagugaa

SEQ ID NO: 1588 - RNA, 19 nt, Artificial Sequence
  source: /note="Description of Artificial Sequence: Synthetic oligonucleotide"
caagcggaguuguuuaacc

SEQ ID NO: 1589 - RNA, 19 nt, Artificial Sequence
  source: /note="Description of Artificial Sequence: Synthetic oligonucleotide"
gauguccauacucaagcgg

SEQ ID NO: 1590 - RNA, 19 nt, Artificial Sequence
  source: /note="Description of Artificial Sequence: Synthetic oligonucleotide"
guaagaaacaucgaugucc

SEQ ID NO: 1591 - RNA, 19 nt, Artificial Sequence
  source: /note="Description of Artificial Sequence: Synthetic oligonucleotide"
augcuuguaagaaacaucg

SEQ ID NO: 1592 - RNA, 19 nt, Artificial Sequence
  source: /note="Description of Artificial Sequence: Synthetic oligonucleotide"
uaaggcaccuuuaugcuug

SEQ ID NO: 1593 - RNA, 19 nt, Artificial Sequence
  source: /note="Description of Artificial Sequence: Synthetic oligonucleotide"
uuauaauuauguaaggcac

SEQ ID NO: 1594 - RNA, 19 nt, Artificial Sequence
  source: /note="Description of Artificial Sequence: Synthetic oligonucleotide"
ugucauuuuauaauuaugu

SEQ ID NO: 1595 - RNA, 19 nt, Artificial Sequence
  source: /note="Description of Artificial Sequence: Synthetic oligonucleotide"
aauucuugucugucauuuu

SEQ ID NO: 1596 - RNA, 19 nt, Artificial Sequence
  source: /note="Description of Artificial Sequence: Synthetic oligonucleotide"
ccucccaaggaaauucuug

SEQ ID NO: 1597 - RNA, 19 nt, Artificial Sequence
  source: /note="Description of Artificial Sequence: Synthetic oligonucleotide"
cucuacuggccucccaagg

SEQ ID NO: 1598 - RNA, 19 nt, Artificial Sequence
  source: /note="Description of Artificial Sequence: Synthetic oligonucleotide"
auugagaagcaccucuacu

SEQ ID NO: 1599 - RNA, 19 nt, Artificial Sequence
  source: /note="Description of Artificial Sequence: Synthetic oligonucleotide"
ugaggucaucauugagaag

SEQ ID NO: 1600 - RNA, 19 nt, Artificial Sequence
  source: /note="Description of Artificial Sequence: Synthetic oligonucleotide"
uguacugacaaugagguca

SEQ ID NO: 1601 - RNA, 19 nt, Artificial Sequence
  source: /note="Description of Artificial Sequence: Synthetic oligonucleotide"
ugccaaauccuguacugac

SEQ ID NO: 1602 - RNA, 19 nt, Artificial Sequence
  source: /note="Description of Artificial Sequence: Synthetic oligonucleotide"
caagccacugccaaauccu

SEQ ID NO: 1603 - RNA, 19 nt, Artificial Sequence
  source: /note="Description of Artificial Sequence: Synthetic oligonucleotide"
auguacuguagccaagcca

SEQ ID NO: 1604 - RNA, 19 nt, Artificial Sequence
  source: /note="Description of Artificial Sequence: Synthetic oligonucleotide"
uuguuacauguacuguagc

SEQ ID NO: 1605 - RNA, 19 nt, Artificial Sequence
  source: /note="Description of Artificial Sequence: Synthetic oligonucleotide"
uuugugaacuacaguuguu

SEQ ID NO: 1606 - RNA, 19 nt, Artificial Sequence
  source: /note="Description of Artificial Sequence: Synthetic oligonucleotide"
uacugguuuugugaacuac

SEQ ID NO: 1607 - RNA, 19 nt, Artificial Sequence
  source: /note="Description of Artificial Sequence: Synthetic oligonucleotide"
uccucagagguacugguuu

SEQ ID NO: 1608 - RNA, 19 nt, Artificial Sequence
  source: /note="Description of Artificial Sequence: Synthetic oligonucleotide"
aaagcugcaaacuuccuca

SEQ ID NO: 1609 - RNA, 19 nt, Artificial Sequence
  source: /note="Description of Artificial Sequence: Synthetic oligonucleotide"
uuuucaaauaaaagcugca

SEQ ID NO: 1610 - RNA, 19 nt, Artificial Sequence
  source: /note="Description of Artificial Sequence: Synthetic oligonucleotide"
ugaguaucgauuuucaaau

SEQ ID NO: 1611 - RNA, 19 nt, Artificial Sequence
  source: /note="Description of Artificial Sequence: Synthetic oligonucleotide"
uucaauauccugaguaucg

SEQ ID NO: 1612 - RNA, 19 nt, Artificial Sequence
  source: /note="Description of Artificial Sequence: Synthetic oligonucleotide"
gugggaugcuucaauaucc

SEQ ID NO: 1613 - RNA, 19 nt, Artificial Sequence
  source: /note="Description of Artificial Sequence: Synthetic oligonucleotide"
cucuguagugggaugcuuc

SEQ ID NO: 1614 - RNA, 19 nt, Artificial Sequence
  source: /note="Description of Artificial Sequence: Synthetic oligonucleotide"
uuuccguagccucuguagu

SEQ ID NO: 1615 - RNA, 19 nt, Artificial Sequence
  source: /note="Description of Artificial Sequence: Synthetic oligonucleotide"
uuuguaaucagaguuuccg

SEQ ID NO: 1616 - RNA, 19 nt, Artificial Sequence
  source: /note="Description of Artificial Sequence: Synthetic oligonucleotide"
uacuaugcguuuguaauca

SEQ ID NO: 1617 - RNA, 19 nt, Artificial Sequence
  source: /note="Description of Artificial Sequence: Synthetic oligonucleotide"
cuggcacaugcuacuaugc

SEQ ID NO: 1618 - RNA, 19 nt, Artificial Sequence
  source: /note="Description of Artificial Sequence: Synthetic oligonucleotide"
gcuuguagcuggcacaugc

SEQ ID NO: 1619 - RNA, 19 nt, Artificial Sequence
  source: /note="Description of Artificial Sequence: Synthetic oligonucleotide"
uucccugcugggcuuguag

SEQ ID NO: 1620 - RNA, 19 nt, Artificial Sequence
  source: /note="Description of Artificial Sequence: Synthetic oligonucleotide"
ugaugauucuucccugcug

SEQ ID NO: 1621 - RNA, 19 nt, Artificial Sequence
  source: /note="Description of Artificial Sequence: Synthetic oligonucleotide"
aggauccagaugaugauuc

SEQ ID NO: 1622 - RNA, 19 nt, Artificial Sequence
  source: /note="Description of Artificial Sequence: Synthetic oligonucleotide"
aucaccgcaugagaggauc

SEQ ID NO: 1623 - RNA, 19 nt, Artificial Sequence
  source: /note="Description of Artificial Sequence: Synthetic oligonucleotide"
auguccaucaccgcaugag

SEQ ID NO: 1624 - RNA, 19 nt, Artificial Sequence
  source: /note="Description of Artificial Sequence: Synthetic oligonucleotide"
aggcaaggagauguccauc

SEQ ID NO: 1625 - RNA, 19 nt, Artificial Sequence
  source: /note="Description of Artificial Sequence: Synthetic oligonucleotide"
acugauuccaguaggcaag

SEQ ID NO: 1626 - RNA, 19 nt, Artificial Sequence
  source: /note="Description of Artificial Sequence: Synthetic oligonucleotide"
ucuucauuugcacugauuc

SEQ ID NO: 1627 - RNA, 19 nt, Artificial Sequence
  source: /note="Description of Artificial Sequence: Synthetic oligonucleotide"
uuuuaagucuucuucauuu

SEQ ID NO: 1628 - RNA, 19 nt, Artificial Sequence
  source: /note="Description of Artificial Sequence: Synthetic oligonucleotide"
caagggcuuuuaagucuuc

SEQ ID NO: 1629 - RNA, 19 nt, Artificial Sequence
  source: /note="Description of Artificial Sequence: Synthetic oligonucleotide"
auccaccccuuccacaagg

SEQ ID NO: 1630 - RNA, 19 nt, Artificial Sequence
  source: /note="Description of Artificial Sequence: Synthetic oligonucleotide"
auaguugauccaccccuuc

SEQ ID NO: 1631 - RNA, 19 nt, Artificial Sequence
  source: /note="Description of Artificial Sequence: Synthetic oligonucleotide"
uaaucagugaauaguugau

SEQ ID NO: 1632 - RNA, 19 nt, Artificial Sequence
  source: /note="Description of Artificial Sequence: Synthetic oligonucleotide"
uuugauuugguaaucagug

SEQ ID NO: 1633 - RNA, 19 nt, Artificial Sequence
  source: /note="Description of Artificial Sequence: Synthetic oligonucleotide"
uaacauguccaucuuugau

SEQ ID NO: 1634 - RNA, 19 nt, Artificial Sequence
  source: /note="Description of Artificial Sequence: Synthetic oligonucleotide"
guugcagaauaacaugucc

SEQ ID NO: 1635 - RNA, 19 nt, Artificial Sequence
  source: /note="Description of Artificial Sequence: Synthetic oligonucleotide"
aaucgaauucaguugcaga

SEQ ID NO: 1636 - RNA, 19 nt, Artificial Sequence
  source: /note="Description of Artificial Sequence: Synthetic oligonucleotide"
acuggagggaaucgaauuc

SEQ ID NO: 1637 - RNA, 19 nt, Artificial Sequence
  source: /note="Description of Artificial Sequence: Synthetic oligonucleotide"
aaaggaaaucacuggaggg

SEQ ID NO: 1638 - RNA, 19 nt, Artificial Sequence
  source: /note="Description of Artificial Sequence: Synthetic oligonucleotide"
aucguacacaaaggaaauc

SEQ ID NO: 1639 - RNA, 19 nt, Artificial Sequence
  source: /note="Description of Artificial Sequence: Synthetic oligonucleotide"
caaauauccggaaucguac

SEQ ID NO: 1640 - RNA, 19 nt, Artificial Sequence
  source: /note="Description of Artificial Sequence: Synthetic oligonucleotide"
caaagaguucaaauauccg

SEQ ID NO: 1641 - RNA, 19 nt, Artificial Sequence
  source: /note="Description of Artificial Sequence: Synthetic oligonucleotide"
aaacccaacuucaaagagu

SEQ ID NO: 1642 - RNA, 19 nt, Artificial Sequence
  source: /note="Description of Artificial Sequence: Synthetic oligonucleotide"
aggacugagaaacccaacu

SEQ ID NO: 1643 - RNA, 19 nt, Artificial Sequence
  source: /note="Description of Artificial Sequence: Synthetic oligonucleotide"
aaaguggcaggacugagaa

SEQ ID NO: 1644 - RNA, 19 nt, Artificial Sequence
  source: /note="Description of Artificial Sequence: Synthetic oligonucleotide"
uucguacacugugaaagug

SEQ ID NO: 1645 - RNA, 19 nt, Artificial Sequence
  source: /note="Description of Artificial Sequence: Synthetic oligonucleotide"
gugguauucguacacugug

SEQ ID NO: 1646 - RNA, 19 nt, Artificial Sequence
  source: /note="Description of Artificial Sequence: Synthetic oligonucleotide"
uguuuaucuggucuguggu

SEQ ID NO: 1647 - RNA, 19 nt, Artificial Sequence
  source: /note="Description of Artificial Sequence: Synthetic oligonucleotide"
ugguacacuguuuaucugg

SEQ ID NO: 1648 - RNA, 19 nt, Artificial Sequence
  source: /note="Description of Artificial Sequence: Synthetic oligonucleotide"
uauaaaacaugguacacug

SEQ ID NO: 1649 - RNA, 19 nt, Artificial Sequence
  source: /note="Description of Artificial Sequence: Synthetic oligonucleotide"
auuggaagugcuauaaaac

SEQ ID NO: 1650 - RNA, 19 nt, Artificial Sequence
  source: /note="Description of Artificial Sequence: Synthetic oligonucleotide"
ugaauuuugauauuggaag

SEQ ID NO: 1651 - RNA, 19 nt, Artificial Sequence
  source: /note="Description of Artificial Sequence: Synthetic oligonucleotide"
agacuuucugaauuuugau

SEQ ID NO: 1652 - RNA, 19 nt, Artificial Sequence
  source: /note="Description of Artificial Sequence: Synthetic oligonucleotide"
ggcuccuucacagacuuuc

SEQ ID NO: 1653 - RNA, 19 nt, Artificial Sequence
  source: /note="Description of Artificial Sequence: Synthetic oligonucleotide"
acuugcacgcggcuccuuc

SEQ ID NO: 1654 - RNA, 19 nt, Artificial Sequence
  source: /note="Description of Artificial Sequence: Synthetic oligonucleotide"
gcuucuacacacuugcacg

SEQ ID NO: 1655 - RNA, 19 nt, Artificial Sequence
  source: /note="Description of Artificial Sequence: Synthetic oligonucleotide"
gcccacaaucagcuucuac

SEQ ID NO: 1656 - RNA, 19 nt, Artificial Sequence
  source: /note="Description of Artificial Sequence: Synthetic oligonucleotide"
ugcauuugcccacaaucag

SEQ ID NO: 1657 - RNA, 19 nt, Artificial Sequence
  source: /note="Description of Artificial Sequence: Synthetic oligonucleotide"
caauucuuccugcauuugc

SEQ ID NO: 1658 - RNA, 19 nt, Artificial Sequence
  source: /note="Description of Artificial Sequence: Synthetic oligonucleotide"
uugucagauccaauucuuc

SEQ ID NO: 1659 - RNA, 19 nt, Artificial Sequence
  source: /note="Description of Artificial Sequence: Synthetic oligonucleotide"
ucucugcagagauugucag

SEQ ID NO: 1660 - RNA, 19 nt, Artificial Sequence
  source: /note="Description of Artificial Sequence: Synthetic oligonucleotide"
uuuguuuucuugucucugc

SEQ ID NO: 1661 - RNA, 19 nt, Artificial Sequence
  source: /note="Description of Artificial Sequence: Synthetic oligonucleotide"
caugcuguuuguuuucuug

SEQ ID NO: 1662 - RNA, 19 nt, Artificial Sequence
  source: /note="Description of Artificial Sequence: Synthetic oligonucleotide"
ucucugguuuacaugcugu

SEQ ID NO: 1663 - RNA, 19 nt, Artificial Sequence
  source: /note="Description of Artificial Sequence: Synthetic oligonucleotide"
aagcauaugcaaucucugg

SEQ ID NO: 1664 - RNA, 19 nt, Artificial Sequence
  source: /note="Description of Artificial Sequence: Synthetic oligonucleotide"
uaacuuuauaagcauaugc

SEQ ID NO: 1665 - RNA, 19 nt, Artificial Sequence
  source: /note="Description of Artificial Sequence: Synthetic oligonucleotide"
ugugaugcuaacuuuauaa

SEQ ID NO: 1666 - RNA, 19 nt, Artificial Sequence
  source: /note="Description of Artificial Sequence: Synthetic oligonucleotide"
uacagugauggaugugaug

SEQ ID NO: 1667 - RNA, 19 nt, Artificial Sequence
  source: /note="Description of Artificial Sequence: Synthetic oligonucleotide"
aaaacauuuucuacaguga

SEQ ID NO: 1668 - RNA, 19 nt, Artificial Sequence
  source: /note="Description of Artificial Sequence: Synthetic oligonucleotide"
cuugacaaaaacauuuucu

SEQ ID NO: 1669 - RNA, 19 nt, Artificial Sequence
  source: /note="Description of Artificial Sequence: Synthetic oligonucleotide"
uugccuuguacuugacaaa

SEQ ID NO: 1670 - RNA, 19 nt, Artificial Sequence
  source: /note="Description of Artificial Sequence: Synthetic oligonucleotide"
auauccagaaggguugccu

SEQ ID NO: 1671 - RNA, 19 nt, Artificial Sequence
  source: /note="Description of Artificial Sequence: Synthetic oligonucleotide"
uuuguagauauccagaagg

SEQ ID NO: 1672 - RNA, 19 nt, Artificial Sequence
  source: /note="Description of Artificial Sequence: Synthetic oligonucleotide"
uuccccaguuuuguagaua

SEQ ID NO: 1673 - RNA, 19 nt, Artificial Sequence
  source: /note="Description of Artificial Sequence: Synthetic oligonucleotide"
ucagcaacagcuuccccag

SEQ ID NO: 1674 - RNA, 19 nt, Artificial Sequence
  source: /note="Description of Artificial Sequence: Synthetic oligonucleotide"
gagucuuucucagcaacag

SEQ ID NO: 1675 - RNA, 19 nt, Artificial Sequence
  source: /note="Description of Artificial Sequence: Synthetic oligonucleotide"
ugaagguaaucucagaguc

SEQ ID NO: 1676 - RNA, 19 nt, Artificial Sequence
  source: /note="Description of Artificial Sequence: Synthetic oligonucleotide"
uuuuaaugaagguaaucuc

SEQ ID NO: 1677 - RNA, 19 nt, Artificial Sequence
  source: /note="Description of Artificial Sequence: Synthetic oligonucleotide"
uacagguuaccuuuuuaau

SEQ ID NO: 1678 - RNA, 19 nt, Artificial Sequence
  source: /note="Description of Artificial Sequence: Synthetic oligonucleotide"
ucagcguuaguacagguua

SEQ ID NO: 1679 - RNA, 19 nt, Artificial Sequence
  source: /note="Description of Artificial Sequence: Synthetic oligonucleotide"
uuuaccagcucagcguuag

SEQ ID NO: 1680 - RNA, 19 nt, Artificial Sequence
  source: /note="Description of Artificial Sequence: Synthetic oligonucleotide"
guacugucuuccuuuuacc

SEQ ID NO: 1681 - RNA, 19 nt, Artificial Sequence
  source: /note="Description of Artificial Sequence: Synthetic oligonucleotide"
auaauuaaguacugucuuc

SEQ ID NO: 1682 - RNA, 19 nt, Artificial Sequence
  source: /note="Description of Artificial Sequence: Synthetic oligonucleotide"
uucuuuacccauaauuaag

SEQ ID NO: 1683 - RNA, 19 nt, Artificial Sequence
  source: /note="Description of Artificial Sequence: Synthetic oligonucleotide"
uaucuggagggcuucuuua

SEQ ID NO: 1684 - RNA, 19 nt, Artificial Sequence
  source: /note="Description of Artificial Sequence: Synthetic oligonucleotide"
auuguauuuuaucuggagg

SEQ ID NO: 1685 - RNA, 19 nt, Artificial Sequence
  source: /note="Description of Artificial Sequence: Synthetic oligonucleotide"
ugaaacugaaauuguauuu

SEQ ID NO: 1686 - RNA, 19 nt, Artificial Sequence
  source: /note="Description of Artificial Sequence: Synthetic oligonucleotide"
guagauguaccugaaacug

SEQ ID NO: 1687 - RNA, 19 nt, Artificial Sequence
  source: /note="Description of Artificial Sequence: Synthetic oligonucleotide"
ucuaaaggguagauguacc

SEQ ID NO: 1688 - RNA, 19 nt, Artificial Sequence
  source: /note="Description of Artificial Sequence: Synthetic oligonucleotide"
aggucaaggaaucuaaagg

SEQ ID NO: 1689 - RNA, 19 nt, Artificial Sequence
  source: /note="Description of Artificial Sequence: Synthetic oligonucleotide"
uauucaauccaggucaagg

SEQ ID NO: 1690 - RNA, 19 nt, Artificial Sequence
  source: /note="Description of Artificial Sequence: Synthetic oligonucleotide"
cuaggccaguauucaaucc

SEQ ID NO: 1691 - RNA, 19 nt, Artificial Sequence
  source: /note="Description of Artificial Sequence: Synthetic oligonucleotide"
uguugugucucuaggccag

SEQ ID NO: 1692 - RNA, 19 nt, Artificial Sequence
  source: /note="Description of Artificial Sequence: Synthetic oligonucleotide"
gaugaacauguugugucuc

SEQ ID NO: 1693 - RNA, 19 nt, Artificial Sequence
  source: /note="Description of Artificial Sequence: Synthetic oligonucleotide"
aaugcuugacacgaugaac

SEQ ID NO: 1694 - RNA, 19 nt, Artificial Sequence
  source: /note="Description of Artificial Sequence: Synthetic oligonucleotide"
uuagcuaaaaaugcuugac

SEQ ID NO: 1695 - RNA, 19 nt, Artificial Sequence
  source: /note="Description of Artificial Sequence: Synthetic oligonucleotide"
aaauucaucuaaauuagcu

SEQ ID NO: 1696 - RNA, 19 nt, Artificial Sequence
  source: /note="Description of Artificial Sequence: Synthetic oligonucleotide"
aucuucggcaaauucaucu

SEQ ID NO: 1697 - RNA, 19 nt, Artificial Sequence
  source: /note="Description of Artificial Sequence: Synthetic oligonucleotide"
uuuaaaaagauaucuucgg

SEQ ID NO: 1698 - RNA, 19 nt, Artificial Sequence
  source: /note="Description of Artificial Sequence: Synthetic oligonucleotide"
uuagcauccauuuaaaaag

SEQ ID NO: 1699 - RNA, 19 nt, Artificial Sequence
  source: /note="Description of Artificial Sequence: Synthetic oligonucleotide"
uucaggaauuuuagcaucc

SEQ ID NO: 1700 - RNA, 19 nt, Artificial Sequence
  source: /note="Description of Artificial Sequence: Synthetic oligonucleotide"
cugaacuucaggaauuuua

SEQ ID NO: 1701 - RNA, 19 nt, Artificial Sequence
  source: /note="Description of Artificial Sequence: Synthetic oligonucleotide"
aacuguaugcagcugaacu

SEQ ID NO: 1702 - RNA, 19 nt, Artificial Sequence
  source: /note="Description of Artificial Sequence: Synthetic oligonucleotide"
auaagugcaaacuguaugc

SEQ ID NO: 1703 - RNA, 19 nt, Artificial Sequence
  source: /note="Description of Artificial Sequence: Synthetic oligonucleotide"
acaacaggaguccauaagu

SEQ ID NO: 1704 - RNA, 19 nt, Artificial Sequence
  source: /note="Description of Artificial Sequence: Synthetic oligonucleotide"
acuucaacaacaggagucc

SEQ ID NO: 1705 - RNA, 19 nt, Artificial Sequence
  source: /note="Description of Artificial Sequence: Synthetic oligonucleotide"
aaaaaaacgaacuucaaca

SEQ ID NO: 1706 - RNA, 19 nt, Artificial Sequence
  source: /note="Description of Artificial Sequence: Synthetic oligonucleotide"
aaaagaagaaaacaaaaaa

SEQ ID NO: 1707 - RNA, 19 nt, Artificial Sequence
  source: /note="Description of Artificial Sequence: Synthetic oligonucleotide"
aauguuuaaaaaaagaaga

SEQ ID NO: 1708 - RNA, 19 nt, Artificial Sequence
  source: /note="Description of Artificial Sequence: Synthetic oligonucleotide"
agcuaugaauguuuaaaaa

SEQ ID NO: 1709 - RNA, 19 nt, Artificial Sequence
  source: /note="Description of Artificial Sequence: Synthetic oligonucleotide"
uacaaauaagaccagcuau

SEQ ID NO: 1710 - RNA, 19 nt, Artificial Sequence
  source: /note="Description of Artificial Sequence: Synthetic oligonucleotide"
ugagcuuuacaaauaagac

SEQ ID NO: 1711 - RNA, 19 nt, Artificial Sequence
  source: /note="Description of Artificial Sequence: Synthetic oligonucleotide"
ucuaaguaaagugagcuuu

SEQ ID NO: 1712 - RNA, 19 nt, Artificial Sequence
  source: /note="Description of Artificial Sequence: Synthetic oligonucleotide"
agugccacuaauucuaagu

SEQ ID NO: 1713 - RNA, 19 nt, Artificial Sequence
  source: /note="Description of Artificial Sequence: Synthetic oligonucleotide"
aauaaaagcaagugccacu

SEQ ID NO: 1714 - RNA, 19 nt, Artificial Sequence
  source: /note="Description of Artificial Sequence: Synthetic oligonucleotide"
aucauucucuaauaaaagc

SEQ ID NO: 1715 - RNA, 19 nt, Artificial Sequence
  source: /note="Description of Artificial Sequence: Synthetic oligonucleotide"
agcauuugaaaucauucuc

SEQ ID NO: 1716 - RNA, 19 nt, Artificial Sequence
  source: /note="Description of Artificial Sequence: Synthetic oligonucleotide"
aaaguuacagcauuugaaa

SEQ ID NO: 1717 - RNA, 19 nt, Artificial Sequence
  source: /note="Description of Artificial Sequence: Synthetic oligonucleotide"
uguuauuucagaaaguuac

SEQ ID NO: 1718 - RNA, 19 nt, Artificial Sequence
  source: /note="Description of Artificial Sequence: Synthetic oligonucleotide"
uccaaggccauguuauuuc

SEQ ID NO: 1719 - RNA, 19 nt, Artificial Sequence
  source: /note="Description of Artificial Sequence: Synthetic oligonucleotide"
gucuucaugcccuccaagg

SEQ ID NO: 1720 - RNA, 19 nt, Artificial Sequence
  source: /note="Description of Artificial Sequence: Synthetic oligonucleotide"
guaucugucuucaugcccu

SEQ ID NO: 1721 - RNA, 19 nt, Artificial Sequence
  source: /note="Description of Artificial Sequence: Synthetic oligonucleotide"
auaaccuuggaggaguauc

SEQ ID NO: 1722 - RNA, 19 nt, Artificial Sequence
  source: /note="Description of Artificial Sequence: Synthetic oligonucleotide"
uguccaauaaccuuggagg

SEQ ID NO: 1723 - RNA, 19 nt, Artificial Sequence
  source: /note="Description of Artificial Sequence: Synthetic oligonucleotide"
uuuauuguuuccggugucc

SEQ ID NO: 1724 - RNA, 19 nt, Artificial Sequence
  source: /note="Description of Artificial Sequence: Synthetic oligonucleotide"
uguuccaauuuauuguuuc

SEQ ID NO: 1725 - RNA, 19 nt, Artificial Sequence
  source: /note="Description of Artificial Sequence: Synthetic oligonucleotide"
uuugaggagguguuccaau

SEQ ID NO: 1726 - RNA, 19 nt, Artificial Sequence
  source: /note="Description of Artificial Sequence: Synthetic oligonucleotide"
ugagugguagguuugagga

SEQ ID NO: 1727 - RNA, 19 nt, Artificial Sequence
  source: /note="Description of Artificial Sequence: Synthetic oligonucleotide"
aaacauuccugagugguag

SEQ ID NO: 1728 - RNA, 19 nt, Artificial Sequence
  source: /note="Description of Artificial Sequence: Synthetic oligonucleotide"
uucggccccagcaaacauu

SEQ ID NO: 1729 - RNA, 19 nt, Artificial Sequence
  source: /note="Description of Artificial Sequence: Synthetic oligonucleotide"
uguucuuucggccccagca

SEQ ID NO: 1730 - RNA, 19 nt, Artificial Sequence
  source: /note="Description of Artificial Sequence: Synthetic oligonucleotide"
uuucaauggacuguucuuu

SEQ ID NO: 1731 - RNA, 19 nt, Artificial Sequence
  source: /note="Description of Artificial Sequence: Synthetic oligonucleotide"
guaauacucccuuucaaug

SEQ ID NO: 1732 - RNA, 19 nt, Artificial Sequence
  source: /note="Description of Artificial Sequence: Synthetic oligonucleotide"
cauguuuuuguaauacucc

SEQ ID NO: 1733 - RNA, 19 nt, Artificial Sequence
  source: /note="Description of Artificial Sequence: Synthetic oligonucleotide"
caagcaaaggccauguuuu

SEQ ID NO: 1734 - RNA, 19 nt, Artificial Sequence
  source: /note="Description of Artificial Sequence: Synthetic oligonucleotide"
uuuucuuucaagcaaaggc

SEQ ID NO: 1735 - RNA, 19 nt, Artificial Sequence
  source: /note="Description of Artificial Sequence: Synthetic oligonucleotide"
uuccuugguauuuucuuuc

SEQ ID NO: 1736 - RNA, 19 nt, Artificial Sequence
  source: /note="Description of Artificial Sequence: Synthetic oligonucleotide"
ucaguuuccuguuccuugg

SEQ ID NO: 1737 - RNA, 19 nt, Artificial Sequence
  source: /note="Description of Artificial Sequence: Synthetic oligonucleotide"
caggcuuuaaugaucaguu

SEQ ID NO: 1738 - RNA, 19 nt, Artificial Sequence
  source: /note="Description of Artificial Sequence: Synthetic oligonucleotide"
agcaaacucaggcuuuaau

SEQ ID NO: 1739 - DNA, 21 bp, Artificial Sequence
  source: /note="Description of Artificial Sequence: Synthetic oligonucleotide"
  source: /note="Description of Combined DNA/RNA Molecule: Synthetic oligonucleotide"
uauccgugguuuccugcuatt

SEQ ID NO: 1740 - DNA, 21 bp, Artificial Sequence
  source: /note="Description of Artificial Sequence: Synthetic oligonucleotide"
  source: /note="Description of Combined DNA/RNA Molecule: Synthetic oligonucleotide"
gguuuccugcuaccuccaatt

SEQ ID NO: 1741 - DNA, 21 bp, Artificial Sequence
  source: /note="Description of Artificial Sequence: Synthetic oligonucleotide"
  source: /note="Description of Combined DNA/RNA Molecule: Synthetic oligonucleotide"
ccuccaaccaugggccuuutt

SEQ ID NO: 1742 - DNA, 21 bp, Artificial Sequence
  source: /note="Description of Artificial Sequence: Synthetic oligonucleotide"
  source: /note="Description of Combined DNA/RNA Molecule: Synthetic oligonucleotide"
gggccuuuugggaauacuutt

SEQ ID NO: 1743 - DNA, 21 bp, Artificial Sequence
  source: /note="Description of Artificial Sequence: Synthetic oligonucleotide"
  source: /note="Description of Combined DNA/RNA Molecule: Synthetic oligonucleotide"
ggaauacuuuguuuuuuaatt

SEQ ID NO: 1744 - DNA, 21 bp, Artificial Sequence
  source: /note="Description of Artificial Sequence: Synthetic oligonucleotide"
  source: /note="Description of Combined DNA/RNA Molecule: Synthetic oligonucleotide"
cuuuguuuuuuaaucuucctt

SEQ ID NO: 1745 - DNA, 21 bp, Artificial Sequence
  source: /note="Description of Artificial Sequence: Synthetic oligonucleotide"
  source: /note="Description of Combined DNA/RNA Molecule: Synthetic oligonucleotide"
cuuccuggggaaaaccuggtt

SEQ ID NO: 1746 - DNA, 21 bp, Artificial Sequence
  source: /note="Description of Artificial Sequence: Synthetic oligonucleotide"
  source: /note="Description of Combined DNA/RNA Molecule: Synthetic oligonucleotide"
ggaaaaccuggggacaggatt

SEQ ID NO: 1747 - DNA, 21 bp, Artificial Sequence
  source: /note="Description of Artificial Sequence: Synthetic oligonucleotide"
  source: /note="Description of Combined DNA/RNA Molecule: Synthetic oligonucleotide"
gggacaggagcaaacauautt

SEQ ID NO: 1748 - DNA, 21 bp, Artificial Sequence
  source: /note="Description of Artificial Sequence: Synthetic oligonucleotide"
  source: /note="Description of Combined DNA/RNA Molecule: Synthetic oligonucleotide"
caaacauaugucauuucagtt

SEQ ID NO: 1749 - DNA, 21 bp, Artificial Sequence
  source: /note="Description of Artificial Sequence: Synthetic oligonucleotide"
  source: /note="Description of Combined DNA/RNA Molecule: Synthetic oligonucleotide"
cauuucagcaccaaaaauatt

SEQ ID NO: 1750 - DNA, 21 bp, Artificial Sequence
  source: /note="Description of Artificial Sequence: Synthetic oligonucleotide"
  source: /note="Description of Combined DNA/RNA Molecule: Synthetic oligonucleotide"
gcaccaaaaauauuccgugtt

SEQ ID NO: 1751 - DNA, 21 bp, Artificial Sequence
  source: /note="Description of Artificial Sequence: Synthetic oligonucleotide"
  source: /note="Description of Combined DNA/RNA Molecule: Synthetic oligonucleotide"
ccguguuggagcaucugaatt

SEQ ID NO: 1752 - DNA, 21 bp, Artificial Sequence
  source: /note="Description of Artificial Sequence: Synthetic oligonucleotide"
  source: /note="Description of Combined DNA/RNA Molecule: Synthetic oligonucleotide"
ggagcaucugaaaauauugtt

SEQ ID NO: 1753 - DNA, 21 bp, Artificial Sequence
  source: /note="Description of Artificial Sequence: Synthetic oligonucleotide"
  source: /note="Description of Combined DNA/RNA Molecule: Synthetic oligonucleotide"
gaaaauauugugauucaagtt

SEQ ID NO: 1754 - DNA, 21 bp, Artificial Sequence
  source: /note="Description of Artificial Sequence: Synthetic oligonucleotide"
  source: /note="Description of Combined DNA/RNA Molecule: Synthetic oligonucleotide"
gauucaaguuuauggauactt

SEQ ID NO: 1755 - DNA, 21 bp, Artificial Sequence
  source: /note="Description of Artificial Sequence: Synthetic oligonucleotide"
  source: /note="Description of Combined DNA/RNA Molecule: Synthetic oligonucleotide"
ggauacacugaagcauuugtt

SEQ ID NO: 1756 - DNA, 21 bp, Artificial Sequence
  source: /note="Description of Artificial Sequence: Synthetic oligonucleotide"
  source: /note="Description of Combined DNA/RNA Molecule: Synthetic oligonucleotide"
gaagcauuugaugcaacaatt

SEQ ID NO: 1757 - DNA, 21 bp, Artificial Sequence
  source: /note="Description of Artificial Sequence: Synthetic oligonucleotide"
  source: /note="Description of Combined DNA/RNA Molecule: Synthetic oligonucleotide"
ugcaacaaucucuauuaaatt

SEQ ID NO: 1758 - DNA, 21 bp, Artificial Sequence
  source: /note="Description of Artificial Sequence: Synthetic oligonucleotide"
  source: /note="Description of Combined DNA/RNA Molecule: Synthetic oligonucleotide"
aaucucuauuaaaaguuautt

SEQ ID NO: 1759 - DNA, 21 bp, Artificial Sequence
  source: /note="Description of Artificial Sequence: Synthetic oligonucleotide"
  source: /note="Description of Combined DNA/RNA Molecule: Synthetic oligonucleotide"
aaguuauccugauaaaaaatt

SEQ ID NO: 1760 - DNA, 21 bp, Artificial Sequence
  source: /note="Description of Artificial Sequence: Synthetic oligonucleotide"
  source: /note="Description of Combined DNA/RNA Molecule: Synthetic oligonucleotide"
cugauaaaaaauuuaguuatt

SEQ ID NO: 1761 - DNA, 21 bp, Artificial Sequence
  source: /note="Description of Artificial Sequence: Synthetic oligonucleotide"
  source: /note="Description of Combined DNA/RNA Molecule: Synthetic oligonucleotide"
uuaguuacuccucaggccatt

SEQ ID NO: 1762 - DNA, 21 bp, Artificial Sequence
  source: /note="Description of Artificial Sequence: Synthetic oligonucleotide"
  source: /note="Description of Combined DNA/RNA Molecule: Synthetic oligonucleotide"
ccucaggccauguucauuutt

SEQ ID NO: 1763 - DNA, 21 bp, Artificial Sequence
  source: /note="Description of Artificial Sequence: Synthetic oligonucleotide"
  source: /note="Description of Combined DNA/RNA Molecule: Synthetic oligonucleotide"
uucauuuauccucagagaatt

SEQ ID NO: 1764 - DNA, 21 bp, Artificial Sequence
  source: /note="Description of Artificial Sequence: Synthetic oligonucleotide"
  source: /note="Description of Combined DNA/RNA Molecule: Synthetic oligonucleotide"
cucagagaauaaauuccaatt

SEQ ID NO: 1765 - DNA, 21 bp, Artificial Sequence
  source: /note="Description of Artificial Sequence: Synthetic oligonucleotide"
  source: /note="Description of Combined DNA/RNA Molecule: Synthetic oligonucleotide"
aauaaauuccaaaacucugtt

SEQ ID NO: 1766 - DNA, 21 bp, Artificial Sequence
  source: /note="Description of Artificial Sequence: Synthetic oligonucleotide"
  source: /note="Description of Combined DNA/RNA Molecule: Synthetic oligonucleotide"
cucugcaaucuuaacaauatt

SEQ ID NO: 1767 - DNA, 21 bp, Artificial Sequence
  source: /note="Description of Artificial Sequence: Synthetic oligonucleotide"
  source: /note="Description of Combined DNA/RNA Molecule: Synthetic oligonucleotide"
cuuaacaauacaaccaaaatt

SEQ ID NO: 1768 - DNA, 21 bp, Artificial Sequence
  source: /note="Description of Artificial Sequence: Synthetic oligonucleotide"
  source: /note="Description of Combined DNA/RNA Molecule: Synthetic oligonucleotide"
caaccaaaacaauugccugtt

SEQ ID NO: 1769 - DNA, 21 bp, Artificial Sequence
  source: /note="Description of Artificial Sequence: Synthetic oligonucleotide"
  source: /note="Description of Combined DNA/RNA Molecule: Synthetic oligonucleotide"
caauugccuggaggacaaatt

SEQ ID NO: 1770 - DNA, 21 bp, Artificial Sequence
  source: /note="Description of Artificial Sequence: Synthetic oligonucleotide"
  source: /note="Description of Combined DNA/RNA Molecule: Synthetic oligonucleotide"
ggacaaaacccaguuucuutt

SEQ ID NO: 1771 - DNA, 21 bp, Artificial Sequence
  source: /note="Description of Artificial Sequence: Synthetic oligonucleotide"
  source: /note="Description of Combined DNA/RNA Molecule: Synthetic oligonucleotide"
ccaguuucuuauguguauutt

SEQ ID NO: 1772 - DNA, 21 bp, Artificial Sequence
  source: /note="Description of Artificial Sequence: Synthetic oligonucleotide"
  source: /note="Description of Combined DNA/RNA Molecule: Synthetic oligonucleotide"
auguguauuuggaaguugutt

SEQ ID NO: 1773 - DNA, 21 bp, Artificial Sequence
  source: /note="Description of Artificial Sequence: Synthetic oligonucleotide"
  source: /note="Description of Combined DNA/RNA Molecule: Synthetic oligonucleotide"
ggaaguuguaucaaagcautt

SEQ ID NO: 1774 - DNA, 21 bp, Artificial Sequence
  source: /note="Description of Artificial Sequence: Synthetic oligonucleotide"
  source: /note="Description of Combined DNA/RNA Molecule: Synthetic oligonucleotide"
guaucaaagcauuuuucaatt

SEQ ID NO: 1775 - DNA, 21 bp, Artificial Sequence
  source: /note="Description of Artificial Sequence: Synthetic oligonucleotide"
  source: /note="Description of Combined DNA/RNA Molecule: Synthetic oligonucleotide"
uuuucaaaaucaaaaagaatt

SEQ ID NO: 1776 - DNA, 21 bp, Artificial Sequence
  source: /note="Description of Artificial Sequence: Synthetic oligonucleotide"
  source: /note="Description of Combined DNA/RNA Molecule: Synthetic oligonucleotide"
caaaaagaaugccaauaactt

SEQ ID NO: 1777 - DNA, 21 bp, Artificial Sequence
  source: /note="Description of Artificial Sequence: Synthetic oligonucleotide"
  source: /note="Description of Combined DNA/RNA Molecule: Synthetic oligonucleotide"
gccaauaaccuaugacaautt

SEQ ID NO: 1778 - DNA, 21 bp, Artificial Sequence
  source: /note="Description of Artificial Sequence: Synthetic oligonucleotide"
  source: /note="Description of Combined DNA/RNA Molecule: Synthetic oligonucleotide"
ccuaugacaauggauuucutt

SEQ ID NO: 1779 - DNA, 21 bp, Artificial Sequence
  source: /note="Description of Artificial Sequence: Synthetic oligonucleotide"
  source: /note="Description of Combined DNA/RNA Molecule: Synthetic oligonucleotide"
uggauuucucuucauucautt

SEQ ID NO: 1780 - DNA, 21 bp, Artificial Sequence
  source: /note="Description of Artificial Sequence: Synthetic oligonucleotide"
  source: /note="Description of Combined DNA/RNA Molecule: Synthetic oligonucleotide"
cauucauacagacaaaccutt

SEQ ID NO: 1781 - DNA, 21 bp, Artificial Sequence
  source: /note="Description of Artificial Sequence: Synthetic oligonucleotide"
  source: /note="Description of Combined DNA/RNA Molecule: Synthetic oligonucleotide"
cagacaaaccuguuuauactt

SEQ ID NO: 1782 - DNA, 21 bp, Artificial Sequence
  source: /note="Description of Artificial Sequence: Synthetic oligonucleotide"
  source: /note="Description of Combined DNA/RNA Molecule: Synthetic oligonucleotide"
guuuauacuccagaccagutt

SEQ ID NO: 1783 - DNA, 21 bp, Artificial Sequence
  source: /note="Description of Artificial Sequence: Synthetic oligonucleotide"
  source: /note="Description of Combined DNA/RNA Molecule: Synthetic oligonucleotide"
agaccagucaguaaaaguutt

SEQ ID NO: 1784 - DNA, 21 bp, Artificial Sequence
  source: /note="Description of Artificial Sequence: Synthetic oligonucleotide"
  source: /note="Description of Combined DNA/RNA Molecule: Synthetic oligonucleotide"
aguaaaaguuagaguuuautt

SEQ ID NO: 1785 - DNA, 21 bp, Artificial Sequence
  source: /note="Description of Artificial Sequence: Synthetic oligonucleotide"
  source: /note="Description of Combined DNA/RNA Molecule: Synthetic oligonucleotide"
agaguuuauucguugaaugtt

SEQ ID NO: 1786 - DNA, 21 bp, Artificial Sequence
  source: /note="Description of Artificial Sequence: Synthetic oligonucleotide"
  source: /note="Description of Combined DNA/RNA Molecule: Synthetic oligonucleotide"
cguugaaugacgacuugaatt

SEQ ID NO: 1787 - DNA, 21 bp, Artificial Sequence
  source: /note="Description of Artificial Sequence: Synthetic oligonucleotide"
  source: /note="Description of Combined DNA/RNA Molecule: Synthetic oligonucleotide"
cuugaagccagccaaaagatt

SEQ ID NO: 1788 - DNA, 21 bp, Artificial Sequence
  source: /note="Description of Artificial Sequence: Synthetic oligonucleotide"
  source: /note="Description of Combined DNA/RNA Molecule: Synthetic oligonucleotide"
ccagccaaaagagaaacugtt

SEQ ID NO: 1789 - DNA, 21 bp, Artificial Sequence
  source: /note="Description of Artificial Sequence: Synthetic oligonucleotide"
  source: /note="Description of Combined DNA/RNA Molecule: Synthetic oligonucleotide"
aaacugucuuaacuuucautt

SEQ ID NO: 1790 - DNA, 21 bp, Artificial Sequence
  source: /note="Description of Artificial Sequence: Synthetic oligonucleotide"
  source: /note="Description of Combined DNA/RNA Molecule: Synthetic oligonucleotide"
aacuuucauagauccugaatt

SEQ ID NO: 1791 - DNA, 21 bp, Artificial Sequence
  source: /note="Description of Artificial Sequence: Synthetic oligonucleotide"
  source: /note="Description of Combined DNA/RNA Molecule: Synthetic oligonucleotide"
cauagauccugaaggaucatt

SEQ ID NO: 1792 - DNA, 21 bp, Artificial Sequence
  source: /note="Description of Artificial Sequence: Synthetic oligonucleotide"
  source: /note="Description of Combined DNA/RNA Molecule: Synthetic oligonucleotide"
gaaggaucagaaguugacatt

SEQ ID NO: 1793 - DNA, 21 bp, Artificial Sequence
  source: /note="Description of Artificial Sequence: Synthetic oligonucleotide"
  source: /note="Description of Combined DNA/RNA Molecule: Synthetic oligonucleotide"
ugacaugguagaagaaauutt

SEQ ID NO: 1794 - DNA, 21 bp, Artificial Sequence
  source: /note="Description of Artificial Sequence: Synthetic oligonucleotide"
  source: /note="Description of Combined DNA/RNA Molecule: Synthetic oligonucleotide"
gaagaaauugaucauauugtt

SEQ ID NO: 1795 - DNA, 21 bp, Artificial Sequence
  source: /note="Description of Artificial Sequence: Synthetic oligonucleotide"
  source: /note="Description of Combined DNA/RNA Molecule: Synthetic oligonucleotide"
gaucauauuggaauuaucutt

SEQ ID NO: 1796 - DNA, 21 bp, Artificial Sequence
  source: /note="Description of Artificial Sequence: Synthetic oligonucleotide"
  source: /note="Description of Combined DNA/RNA Molecule: Synthetic oligonucleotide"
ggaauuaucucuuuuccugtt

SEQ ID NO: 1797 - DNA, 21 bp, Artificial Sequence
  source: /note="Description of Artificial Sequence: Synthetic oligonucleotide"
  source: /note="Description of Combined DNA/RNA Molecule: Synthetic oligonucleotide"
cucuuuuccugacuucaagtt

SEQ ID NO: 1798 - DNA, 21 bp, Artificial Sequence
  source: /note="Description of Artificial Sequence: Synthetic oligonucleotide"
  source: /note="Description of Combined DNA/RNA Molecule: Synthetic oligonucleotide"
acuucaagauuccgucuaatt

SEQ ID NO: 1799 - DNA, 21 bp, Artificial Sequence
  source: /note="Description of Artificial Sequence: Synthetic oligonucleotide"
  source: /note="Description of Combined DNA/RNA Molecule: Synthetic oligonucleotide"
ccgucuaauccuagauaugtt

SEQ ID NO: 1800 - DNA, 21 bp, Artificial Sequence
  source: /note="Description of Artificial Sequence: Synthetic oligonucleotide"
  source: /note="Description of Combined DNA/RNA Molecule: Synthetic oligonucleotide"
ccuagauaugguauguggatt

SEQ ID NO: 1801 - DNA, 21 bp, Artificial Sequence
  source: /note="Description of Artificial Sequence: Synthetic oligonucleotide"
  source: /note="Description of Combined DNA/RNA Molecule: Synthetic oligonucleotide"
uguggacgaucaaggcuaatt

SEQ ID NO: 1802 - DNA, 21 bp, Artificial Sequence
  source: /note="Description of Artificial Sequence: Synthetic oligonucleotide"
  source: /note="Description of Combined DNA/RNA Molecule: Synthetic oligonucleotide"
cgaucaaggcuaaauauaatt

SEQ ID NO: 1803 - DNA, 21 bp, Artificial Sequence
  source: /note="Description of Artificial Sequence: Synthetic oligonucleotide"
  source: /note="Description of Combined DNA/RNA Molecule: Synthetic oligonucleotide"
auauaaagaggacuuuucatt

SEQ ID NO: 1804 - DNA, 21 bp, Artificial Sequence
  source: /note="Description of Artificial Sequence: Synthetic oligonucleotide"
  source: /note="Description of Combined DNA/RNA Molecule: Synthetic oligonucleotide"
gaggacuuuucaacaacugtt

SEQ ID NO: 1805 - DNA, 21 bp, Artificial Sequence
  source: /note="Description of Artificial Sequence: Synthetic oligonucleotide"
  source: /note="Description of Combined DNA/RNA Molecule: Synthetic oligonucleotide"
caacuggaaccgcauauuutt

SEQ ID NO: 1806 - DNA, 21 bp, Artificial Sequence
  source: /note="Description of Artificial Sequence: Synthetic oligonucleotide"
  source: /note="Description of Combined DNA/RNA Molecule: Synthetic oligonucleotide"
cgcauauuuugaaguuaaatt

SEQ ID NO: 1807 - DNA, 21 bp, Artificial Sequence
  source: /note="Description of Artificial Sequence: Synthetic oligonucleotide"
  source: /note="Description of Combined DNA/RNA Molecule: Synthetic oligonucleotide"
aaguuaaagaauaugucuutt

SEQ ID NO: 1808 - DNA, 21 bp, Artificial Sequence
  source: /note="Description of Artificial Sequence: Synthetic oligonucleotide"
  source: /note="Description of Combined DNA/RNA Molecule: Synthetic oligonucleotide"
gaauaugucuugccacauutt

SEQ ID NO: 1809 - DNA, 21 bp, Artificial Sequence
  source: /note="Description of Artificial Sequence: Synthetic oligonucleotide"
  source: /note="Description of Combined DNA/RNA Molecule: Synthetic oligonucleotide"
ccacauuuuucugucucaatt

SEQ ID NO: 1810 - DNA, 21 bp, Artificial Sequence
  source: /note="Description of Artificial Sequence: Synthetic oligonucleotide"
  source: /note="Description of Combined DNA/RNA Molecule: Synthetic oligonucleotide"
cugucucaaucgagccagatt

SEQ ID NO: 1811 - DNA, 21 bp, Artificial Sequence
  source: /note="Description of Artificial Sequence: Synthetic oligonucleotide"
  source: /note="Description of Combined DNA/RNA Molecule: Synthetic oligonucleotide"
caaucgagccagaauauaatt

SEQ ID NO: 1812 - DNA, 21 bp, Artificial Sequence
  source: /note="Description of Artificial Sequence: Synthetic oligonucleotide"
  source: /note="Description of Combined DNA/RNA Molecule: Synthetic oligonucleotide"
gaauauaauuucauugguutt

SEQ ID NO: 1813 - DNA, 21 bp, Artificial Sequence
  source: /note="Description of Artificial Sequence: Synthetic oligonucleotide"
  source: /note="Description of Combined DNA/RNA Molecule: Synthetic oligonucleotide"
auugguuacaagaacuuuatt

SEQ ID NO: 1814 - DNA, 21 bp, Artificial Sequence
  source: /note="Description of Artificial Sequence: Synthetic oligonucleotide"
  source: /note="Description of Combined DNA/RNA Molecule: Synthetic oligonucleotide"
agaacuuuaagaauuuugatt

SEQ ID NO: 1815 - DNA, 21 bp, Artificial Sequence
  source: /note="Description of Artificial Sequence: Synthetic oligonucleotide"
  source: /note="Description of Combined DNA/RNA Molecule: Synthetic oligonucleotide"
gaauuuugaaauuacuauatt

SEQ ID NO: 1816 - DNA, 21 bp, Artificial Sequence
  source: /note="Description of Artificial Sequence: Synthetic oligonucleotide"
  source: /note="Description of Combined DNA/RNA Molecule: Synthetic oligonucleotide"
gaaauuacuauaaaagcaatt

SEQ ID NO: 1817 - DNA, 21 bp, Artificial Sequence
  source: /note="Description of Artificial Sequence: Synthetic oligonucleotide"
  source: /note="Description of Combined DNA/RNA Molecule: Synthetic oligonucleotide"
aaagcaagauauuuuuauatt

SEQ ID NO: 1818 - DNA, 21 bp, Artificial Sequence
  source: /note="Description of Artificial Sequence: Synthetic oligonucleotide"
  source: /note="Description of Combined DNA/RNA Molecule: Synthetic oligonucleotide"
auauuuuuauaauaaaguatt

SEQ ID NO: 1819 - DNA, 21 bp, Artificial Sequence
  source: /note="Description of Artificial Sequence: Synthetic oligonucleotide"
  source: /note="Description of Combined DNA/RNA Molecule: Synthetic oligonucleotide"
aaguagucacugaggcugatt

SEQ ID NO: 1820 - DNA, 21 bp, Artificial Sequence
  source: /note="Description of Artificial Sequence: Synthetic oligonucleotide"
  source: /note="Description of Combined DNA/RNA Molecule: Synthetic oligonucleotide"
cacugaggcugacguuuautt

SEQ ID NO: 1821 - DNA, 21 bp, Artificial Sequence
  source: /note="Description of Artificial Sequence: Synthetic oligonucleotide"
  source: /note="Description of Combined DNA/RNA Molecule: Synthetic oligonucleotide"
cguuuauaucacauuuggatt

SEQ ID NO: 1822 - DNA, 21 bp, Artificial Sequence
  source: /note="Description of Artificial Sequence: Synthetic oligonucleotide"
  source: /note="Description of Combined DNA/RNA Molecule: Synthetic oligonucleotide"
cacauuuggaauaagagaatt

SEQ ID NO: 1823 - DNA, 21 bp, Artificial Sequence
  source: /note="Description of Artificial Sequence: Synthetic oligonucleotide"
  source: /note="Description of Combined DNA/RNA Molecule: Synthetic oligonucleotide"
aauaagagaagacuuaaaatt

SEQ ID NO: 1824 - DNA, 21 bp, Artificial Sequence
  source: /note="Description of Artificial Sequence: Synthetic oligonucleotide"
  source: /note="Description of Combined DNA/RNA Molecule: Synthetic oligonucleotide"
cuuaaaagaugaucaaaaatt

SEQ ID NO: 1825 - DNA, 21 bp, Artificial Sequence
  source: /note="Description of Artificial Sequence: Synthetic oligonucleotide"
  source: /note="Description of Combined DNA/RNA Molecule: Synthetic oligonucleotide"
gaugaucaaaaagaaaugatt

SEQ ID NO: 1826 - DNA, 21 bp, Artificial Sequence
  source: /note="Description of Artificial Sequence: Synthetic oligonucleotide"
  source: /note="Description of Combined DNA/RNA Molecule: Synthetic oligonucleotide"
aaaugaugcaaacagcaautt

SEQ ID NO: 1827 - DNA, 21 bp, Artificial Sequence
  source: /note="Description of Artificial Sequence: Synthetic oligonucleotide"
  source: /note="Description of Combined DNA/RNA Molecule: Synthetic oligonucleotide"
acagcaaugcaaaacacaatt

SEQ ID NO: 1828 - DNA, 21 bp, Artificial Sequence
  source: /note="Description of Artificial Sequence: Synthetic oligonucleotide"
  source: /note="Description of Combined DNA/RNA Molecule: Synthetic oligonucleotide"
aaaacacaauguugauaaatt

SEQ ID NO: 1829 - DNA, 21 bp, Artificial Sequence
  source: /note="Description of Artificial Sequence: Synthetic oligonucleotide"
  source: /note="Description of Combined DNA/RNA Molecule: Synthetic oligonucleotide"
caauguugauaaauggaautt

SEQ ID NO: 1830 - DNA, 21 bp, Artificial Sequence
  source: /note="Description of Artificial Sequence: Synthetic oligonucleotide"
  source: /note="Description of Combined DNA/RNA Molecule: Synthetic oligonucleotide"
ggaauugcucaagucacautt

SEQ ID NO: 1831 - DNA, 21 bp, Artificial Sequence
  source: /note="Description of Artificial Sequence: Synthetic oligonucleotide"
  source: /note="Description of Combined DNA/RNA Molecule: Synthetic oligonucleotide"
gcucaagucacauuugauutt

SEQ ID NO: 1832 - DNA, 21 bp, Artificial Sequence
  source: /note="Description of Artificial Sequence: Synthetic oligonucleotide"
  source: /note="Description of Combined DNA/RNA Molecule: Synthetic oligonucleotide"
auuugauucugaaacagcatt

SEQ ID NO: 1833 - DNA, 21 bp, Artificial Sequence
  source: /note="Description of Artificial Sequence: Synthetic oligonucleotide"
  source: /note="Description of Combined DNA/RNA Molecule: Synthetic oligonucleotide"
ugaaacagcagucaaagaatt

SEQ ID NO: 1834 - DNA, 21 bp, Artificial Sequence
  source: /note="Description of Artificial Sequence: Synthetic oligonucleotide"
  source: /note="Description of Combined DNA/RNA Molecule: Synthetic oligonucleotide"
caaagaacugucauacuactt

SEQ ID NO: 1835 - DNA, 21 bp, Artificial Sequence
  source: /note="Description of Artificial Sequence: Synthetic oligonucleotide"
  source: /note="Description of Combined DNA/RNA Molecule: Synthetic oligonucleotide"
cauacuacaguuuagaagatt

SEQ ID NO: 1836 - DNA, 21 bp, Artificial Sequence
  source: /note="Description of Artificial Sequence: Synthetic oligonucleotide"
  source: /note="Description of Combined DNA/RNA Molecule: Synthetic oligonucleotide"
caguuuagaagauuuaaactt

SEQ ID NO: 1837 - DNA, 21 bp, Artificial Sequence
  source: /note="Description of Artificial Sequence: Synthetic oligonucleotide"
  source: /note="Description of Combined DNA/RNA Molecule: Synthetic oligonucleotide"
uaaacaacaaguaccuuuatt

SEQ ID NO: 1838 - DNA, 21 bp, Artificial Sequence
  source: /note="Description of Artificial Sequence: Synthetic oligonucleotide"
  source: /note="Description of Combined DNA/RNA Molecule: Synthetic oligonucleotide"
caaguaccuuuauauugcutt

SEQ ID NO: 1839 - DNA, 21 bp, Artificial Sequence
  source: /note="Description of Artificial Sequence: Synthetic oligonucleotide"
  source: /note="Description of Combined DNA/RNA Molecule: Synthetic oligonucleotide"
uauugcuguaacagucauatt

SEQ ID NO: 1840 - DNA, 21 bp, Artificial Sequence
  source: /note="Description of Artificial Sequence: Synthetic oligonucleotide"
  source: /note="Description of Combined DNA/RNA Molecule: Synthetic oligonucleotide"
aacagucauagagucuacatt

SEQ ID NO: 1841 - DNA, 21 bp, Artificial Sequence
  source: /note="Description of Artificial Sequence: Synthetic oligonucleotide"
  source: /note="Description of Combined DNA/RNA Molecule: Synthetic oligonucleotide"
agagucuacagguggauuutt

SEQ ID NO: 1842 - DNA, 21 bp, Artificial Sequence
  source: /note="Description of Artificial Sequence: Synthetic oligonucleotide"
  source: /note="Description of Combined DNA/RNA Molecule: Synthetic oligonucleotide"
ggauuuucugaagaggcagtt

SEQ ID NO: 1843 - DNA, 21 bp, Artificial Sequence
  source: /note="Description of Artificial Sequence: Synthetic oligonucleotide"
  source: /note="Description of Combined DNA/RNA Molecule: Synthetic oligonucleotide"
gaagaggcagaaauaccugtt

SEQ ID NO: 1844 - DNA, 21 bp, Artificial Sequence
  source: /note="Description of Artificial Sequence: Synthetic oligonucleotide"
  source: /note="Description of Combined DNA/RNA Molecule: Synthetic oligonucleotide"
agaaauaccuggcaucaaatt

SEQ ID NO: 1845 - DNA, 21 bp, Artificial Sequence
  source: /note="Description of Artificial Sequence: Synthetic oligonucleotide"
  source: /note="Description of Combined DNA/RNA Molecule: Synthetic oligonucleotide"
gcaucaaauauguccucuctt

SEQ ID NO: 1846 - DNA, 21 bp, Artificial Sequence
  source: /note="Description of Artificial Sequence: Synthetic oligonucleotide"
  source: /note="Description of Combined DNA/RNA Molecule: Synthetic oligonucleotide"
uguccucucucccuacaaatt

SEQ ID NO: 1847 - DNA, 21 bp, Artificial Sequence
  source: /note="Description of Artificial Sequence: Synthetic oligonucleotide"
  source: /note="Description of Combined DNA/RNA Molecule: Synthetic oligonucleotide"
gaauuugguugcuacuccutt

SEQ ID NO: 1848 - DNA, 21 bp, Artificial Sequence
  source: /note="Description of Artificial Sequence: Synthetic oligonucleotide"
  source: /note="Description of Combined DNA/RNA Molecule: Synthetic oligonucleotide"
gcuacuccucuuuuccugatt

SEQ ID NO: 1849 - DNA, 21 bp, Artificial Sequence
  source: /note="Description of Artificial Sequence: Synthetic oligonucleotide"
  source: /note="Description of Combined DNA/RNA Molecule: Synthetic oligonucleotide"
cucuuuuccugaagccuggtt

SEQ ID NO: 1850 - DNA, 21 bp, Artificial Sequence
  source: /note="Description of Artificial Sequence: Synthetic oligonucleotide"
  source: /note="Description of Combined DNA/RNA Molecule: Synthetic oligonucleotide"
ccugggauuccauaucccatt

SEQ ID NO: 1851 - DNA, 21 bp, Artificial Sequence
  source: /note="Description of Artificial Sequence: Synthetic oligonucleotide"
  source: /note="Description of Combined DNA/RNA Molecule: Synthetic oligonucleotide"
cauaucccaucaaggugcatt

SEQ ID NO: 1852 - DNA, 21 bp, Artificial Sequence
  source: /note="Description of Artificial Sequence: Synthetic oligonucleotide"
  source: /note="Description of Combined DNA/RNA Molecule: Synthetic oligonucleotide"
ccaucaaggugcagguuaatt

SEQ ID NO: 1853 - DNA, 21 bp, Artificial Sequence
  source: /note="Description of Artificial Sequence: Synthetic oligonucleotide"
  source: /note="Description of Combined DNA/RNA Molecule: Synthetic oligonucleotide"
cagguuaaagauucgcuugtt

SEQ ID NO: 1854 - DNA, 21 bp, Artificial Sequence
  source: /note="Description of Artificial Sequence: Synthetic oligonucleotide"
  source: /note="Description of Combined DNA/RNA Molecule: Synthetic oligonucleotide"
uucgcuugaccaguugguatt

SEQ ID NO: 1855 - DNA, 21 bp, Artificial Sequence
  source: /note="Description of Artificial Sequence: Synthetic oligonucleotide"
  source: /note="Description of Combined DNA/RNA Molecule: Synthetic oligonucleotide"
ccaguugguaggaggaguctt

SEQ ID NO: 1856 - DNA, 21 bp, Artificial Sequence
  source: /note="Description of Artificial Sequence: Synthetic oligonucleotide"
  source: /note="Description of Combined DNA/RNA Molecule: Synthetic oligonucleotide"
ggaggagucccaguaacactt

SEQ ID NO: 1857 - DNA, 21 bp, Artificial Sequence
  source: /note="Description of Artificial Sequence: Synthetic oligonucleotide"
  source: /note="Description of Combined DNA/RNA Molecule: Synthetic oligonucleotide"
caguaacacugaaugcacatt

SEQ ID NO: 1858 - DNA, 21 bp, Artificial Sequence
  source: /note="Description of Artificial Sequence: Synthetic oligonucleotide"
  source: /note="Description of Combined DNA/RNA Molecule: Synthetic oligonucleotide"
gaaugcacaaacaauugautt

SEQ ID NO: 1859 - DNA, 21 bp, Artificial Sequence
  source: /note="Description of Artificial Sequence: Synthetic oligonucleotide"
  source: /note="Description of Combined DNA/RNA Molecule: Synthetic oligonucleotide"
aacaauugauguaaaccaatt

SEQ ID NO: 1860 - DNA, 21 bp, Artificial Sequence
  source: /note="Description of Artificial Sequence: Synthetic oligonucleotide"
  source: /note="Description of Combined DNA/RNA Molecule: Synthetic oligonucleotide"
uaaaccaagagacaucugatt

SEQ ID NO: 1861 - DNA, 21 bp, Artificial Sequence
  source: /note="Description of Artificial Sequence: Synthetic oligonucleotide"
  source: /note="Description of Combined DNA/RNA Molecule: Synthetic oligonucleotide"
caucugacuuggauccaagtt

SEQ ID NO: 1862 - DNA, 21 bp, Artificial Sequence
  source: /note="Description of Artificial Sequence: Synthetic oligonucleotide"
  source: /note="Description of Combined DNA/RNA Molecule: Synthetic oligonucleotide"
gauccaagcaaaaguguaatt

SEQ ID NO: 1863 - DNA, 21 bp, Artificial Sequence
  source: /note="Description of Artificial Sequence: Synthetic oligonucleotide"
  source: /note="Description of Combined DNA/RNA Molecule: Synthetic oligonucleotide"
caaaaguguaacacguguutt

SEQ ID NO: 1864 - DNA, 21 bp, Artificial Sequence
  source: /note="Description of Artificial Sequence: Synthetic oligonucleotide"
  source: /note="Description of Combined DNA/RNA Molecule: Synthetic oligonucleotide"
aacacguguugaugauggatt

SEQ ID NO: 1865 - DNA, 21 bp, Artificial Sequence
  source: /note="Description of Artificial Sequence: Synthetic oligonucleotide"
  source: /note="Description of Combined DNA/RNA Molecule: Synthetic oligonucleotide"
ugauggaguagcuuccuuutt

SEQ ID NO: 1866 - DNA, 21 bp, Artificial Sequence
  source: /note="Description of Artificial Sequence: Synthetic oligonucleotide"
  source: /note="Description of Combined DNA/RNA Molecule: Synthetic oligonucleotide"
guagcuuccuuugugcuuatt

SEQ ID NO: 1867 - DNA, 21 bp, Artificial Sequence
  source: /note="Description of Artificial Sequence: Synthetic oligonucleotide"
  source: /note="Description of Combined DNA/RNA Molecule: Synthetic oligonucleotide"
gcuuaaucucccaucuggatt

SEQ ID NO: 1868 - DNA, 21 bp, Artificial Sequence
  source: /note="Description of Artificial Sequence: Synthetic oligonucleotide"
  source: /note="Description of Combined DNA/RNA Molecule: Synthetic oligonucleotide"
ccaucuggagugacggugctt

SEQ ID NO: 1869 - DNA, 21 bp, Artificial Sequence
  source: /note="Description of Artificial Sequence: Synthetic oligonucleotide"
  source: /note="Description of Combined DNA/RNA Molecule: Synthetic oligonucleotide"
ugacggugcuggaguuuaatt

SEQ ID NO: 1870 - DNA, 21 bp, Artificial Sequence
  source: /note="Description of Artificial Sequence: Synthetic oligonucleotide"
  source: /note="Description of Combined DNA/RNA Molecule: Synthetic oligonucleotide"
gcuggaguuuaaugucaaatt

SEQ ID NO: 1871 - DNA, 21 bp, Artificial Sequence
  source: /note="Description of Artificial Sequence: Synthetic oligonucleotide"
  source: /note="Description of Combined DNA/RNA Molecule: Synthetic oligonucleotide"
ugucaaaacugaugcuccatt

SEQ ID NO: 1872 - DNA, 21 bp, Artificial Sequence
  source: /note="Description of Artificial Sequence: Synthetic oligonucleotide"
  source: /note="Description of Combined DNA/RNA Molecule: Synthetic oligonucleotide"
gaugcuccagaucuuccagtt

SEQ ID NO: 1873 - DNA, 21 bp, Artificial Sequence
  source: /note="Description of Artificial Sequence: Synthetic oligonucleotide"
  source: /note="Description of Combined DNA/RNA Molecule: Synthetic oligonucleotide"
cagaucuuccagaagaaaatt

SEQ ID NO: 1874 - DNA, 21 bp, Artificial Sequence
  source: /note="Description of Artificial Sequence: Synthetic oligonucleotide"
  source: /note="Description of Combined DNA/RNA Molecule: Synthetic oligonucleotide"
agaaaaucaggccagggaatt

SEQ ID NO: 1875 - DNA, 21 bp, Artificial Sequence
  source: /note="Description of Artificial Sequence: Synthetic oligonucleotide"
  source: /note="Description of Combined DNA/RNA Molecule: Synthetic oligonucleotide"
ggccagggaagguuaccgatt

SEQ ID NO: 1876 - DNA, 21 bp, Artificial Sequence
  source: /note="Description of Artificial Sequence: Synthetic oligonucleotide"
  source: /note="Description of Combined DNA/RNA Molecule: Synthetic oligonucleotide"
guuaccgagcaauagcauatt

SEQ ID NO: 1877 - DNA, 21 bp, Artificial Sequence
  source: /note="Description of Artificial Sequence: Synthetic oligonucleotide"
  source: /note="Description of Combined DNA/RNA Molecule: Synthetic oligonucleotide"
auagcauacucaucucucatt

SEQ ID NO: 1878 - DNA, 21 bp, Artificial Sequence
  source: /note="Description of Artificial Sequence: Synthetic oligonucleotide"
  source: /note="Description of Combined DNA/RNA Molecule: Synthetic oligonucleotide"
uacucaucucucagccaaatt

SEQ ID NO: 1879 - DNA, 21 bp, Artificial Sequence
  source: /note="Description of Artificial Sequence: Synthetic oligonucleotide"
  source: /note="Description of Combined DNA/RNA Molecule: Synthetic oligonucleotide"
gccaaaguuaccuuuauautt

SEQ ID NO: 1880 - DNA, 21 bp, Artificial Sequence
  source: /note="Description of Artificial Sequence: Synthetic oligonucleotide"
  source: /note="Description of Combined DNA/RNA Molecule: Synthetic oligonucleotide"
ccuuuauauugauuggacutt

SEQ ID NO: 1881 - DNA, 21 bp, Artificial Sequence
  source: /note="Description of Artificial Sequence: Synthetic oligonucleotide"
  source: /note="Description of Combined DNA/RNA Molecule: Synthetic oligonucleotide"
gauuggacugauaaccauatt

SEQ ID NO: 1882 - DNA, 21 bp, Artificial Sequence
  source: /note="Description of Artificial Sequence: Synthetic oligonucleotide"
  source: /note="Description of Combined DNA/RNA Molecule: Synthetic oligonucleotide"
cugauaaccauaaggcuuutt

SEQ ID NO: 1883 - DNA, 21 bp, Artificial Sequence
  source: /note="Description of Artificial Sequence: Synthetic oligonucleotide"
  source: /note="Description of Combined DNA/RNA Molecule: Synthetic oligonucleotide"
aggcuuugcuagugggagatt

SEQ ID NO: 1884 - DNA, 21 bp, Artificial Sequence
  source: /note="Description of Artificial Sequence: Synthetic oligonucleotide"
  source: /note="Description of Combined DNA/RNA Molecule: Synthetic oligonucleotide"
gugggagaacaucugaauatt

SEQ ID NO: 1885 - DNA, 21 bp, Artificial Sequence
  source: /note="Description of Artificial Sequence: Synthetic oligonucleotide"
  source: /note="Description of Combined DNA/RNA Molecule: Synthetic oligonucleotide"
caucugaauauuauuguuatt

SEQ ID NO: 1886 - DNA, 21 bp, Artificial Sequence
  source: /note="Description of Artificial Sequence: Synthetic oligonucleotide"
  source: /note="Description of Combined DNA/RNA Molecule: Synthetic oligonucleotide"
uauuauuguuacccccaaatt

SEQ ID NO: 1887 - DNA, 21 bp, Artificial Sequence
  source: /note="Description of Artificial Sequence: Synthetic oligonucleotide"
  source: /note="Description of Combined DNA/RNA Molecule: Synthetic oligonucleotide"
cccaaaagcccauauauugtt

SEQ ID NO: 1888 - DNA, 21 bp, Artificial Sequence
  source: /note="Description of Artificial Sequence: Synthetic oligonucleotide"
  source: /note="Description of Combined DNA/RNA Molecule: Synthetic oligonucleotide"
ccaaaagcccauauauugatt

SEQ ID NO: 1889 - DNA, 21 bp, Artificial Sequence
  source: /note="Description of Artificial Sequence: Synthetic oligonucleotide"
  source: /note="Description of Combined DNA/RNA Molecule: Synthetic oligonucleotide"
caaaagcccauauauugactt

SEQ ID NO: 1890 - DNA, 21 bp, Artificial Sequence
  source: /note="Description of Artificial Sequence: Synthetic oligonucleotide"
  source: /note="Description of Combined DNA/RNA Molecule: Synthetic oligonucleotide"
aaaagcccauauauugacatt

SEQ ID NO: 1891 - DNA, 21 bp, Artificial Sequence
  source: /note="Description of Artificial Sequence: Synthetic oligonucleotide"
  source: /note="Description of Combined DNA/RNA Molecule: Synthetic oligonucleotide"
aaagcccauauauugacaatt

SEQ ID NO: 1892 - DNA, 21 bp, Artificial Sequence
  source: /note="Description of Artificial Sequence: Synthetic oligonucleotide"
  source: /note="Description of Combined DNA/RNA Molecule: Synthetic oligonucleotide"
aagcccauauauugacaaatt

SEQ ID NO: 1893 - DNA, 21 bp, Artificial Sequence
  source: /note="Description of Artificial Sequence: Synthetic oligonucleotide"
  source: /note="Description of Combined DNA/RNA Molecule: Synthetic oligonucleotide"
agcccauauauugacaaaatt

SEQ ID NO: 1894 - DNA, 21 bp, Artificial Sequence
  source: /note="Description of Artificial Sequence: Synthetic oligonucleotide"
  source: /note="Description of Combined DNA/RNA Molecule: Synthetic oligonucleotide"
gcccauauauugacaaaautt

SEQ ID NO: 1895 - DNA, 21 bp, Artificial Sequence
  source: /note="Description of Artificial Sequence: Synthetic oligonucleotide"
  source: /note="Description of Combined DNA/RNA Molecule: Synthetic oligonucleotide"
cccauauauugacaaaauatt

SEQ ID NO: 1896 - DNA, 21 bp, Artificial Sequence
  source: /note="Description of Artificial Sequence: Synthetic oligonucleotide"
  source: /note="Description of Combined DNA/RNA Molecule: Synthetic oligonucleotide"
ccauauauugacaaaauaatt

SEQ ID NO: 1897 - DNA, 21 bp, Artificial Sequence
  source: /note="Description of Artificial Sequence: Synthetic oligonucleotide"
  source: /note="Description of Combined DNA/RNA Molecule: Synthetic oligonucleotide"
cauauauugacaaaauaactt

SEQ ID NO: 1898 - DNA, 21 bp, Artificial Sequence
  source: /note="Description of Artificial Sequence: Synthetic oligonucleotide"
  source: /note="Description of Combined DNA/RNA Molecule: Synthetic oligonucleotide"
auauauugacaaaauaacutt

SEQ ID NO: 1899 - DNA, 21 bp, Artificial Sequence
  source: /note="Description of Artificial Sequence: Synthetic oligonucleotide"
  source: /note="Description of Combined DNA/RNA Molecule: Synthetic oligonucleotide"
uauauugacaaaauaacuctt

SEQ ID NO: 1900 - DNA, 21 bp, Artificial Sequence
  source: /note="Description of Artificial Sequence: Synthetic oligonucleotide"
  source: /note="Description of Combined DNA/RNA Molecule: Synthetic oligonucleotide"
auauugacaaaauaacucatt

SEQ ID NO: 1901 - DNA, 21 bp, Artificial Sequence
  source: /note="Description of Artificial Sequence: Synthetic oligonucleotide"
  source: /note="Description of Combined DNA/RNA Molecule: Synthetic oligonucleotide"
uauugacaaaauaacucactt

SEQ ID NO: 1902 - DNA, 21 bp, Artificial Sequence
  source: /note="Description of Artificial Sequence: Synthetic oligonucleotide"
  source: /note="Description of Combined DNA/RNA Molecule: Synthetic oligonucleotide"
auugacaaaauaacucacutt

SEQ ID NO: 1903 - DNA, 21 bp, Artificial Sequence
  source: /note="Description of Artificial Sequence: Synthetic oligonucleotide"
  source: /note="Description of Combined DNA/RNA Molecule: Synthetic oligonucleotide"
uugacaaaauaacucacuatt

SEQ ID NO: 1904 - DNA, 21 bp, Artificial Sequence
  source: /note="Description of Artificial Sequence: Synthetic oligonucleotide"
  source: /note="Description of Combined DNA/RNA Molecule: Synthetic oligonucleotide"
ugacaaaauaacucacuautt

SEQ ID NO: 1905 - DNA, 21 bp, Artificial Sequence
  source: /note="Description of Artificial Sequence: Synthetic oligonucleotide"
  source: /note="Description of Combined DNA/RNA Molecule: Synthetic oligonucleotide"
gacaaaauaacucacuauatt

SEQ ID NO: 1906 - DNA, 21 bp, Artificial Sequence
  source: /note="Description of Artificial Sequence: Synthetic oligonucleotide"
  source: /note="Description of Combined DNA/RNA Molecule: Synthetic oligonucleotide"
aaaauaacucacuauaauutt

SEQ ID NO: 1907 - DNA, 21 bp, Artificial Sequence
  source: /note="Description of Artificial Sequence: Synthetic oligonucleotide"
  source: /note="Description of Combined DNA/RNA Molecule: Synthetic oligonucleotide"
aaauaacucacuauaauuatt

SEQ ID NO: 1908 - DNA, 21 bp, Artificial Sequence
  source: /note="Description of Artificial Sequence: Synthetic oligonucleotide"
  source: /note="Description of Combined DNA/RNA Molecule: Synthetic oligonucleotide"
aauaacucacuauaauuactt

SEQ ID NO: 1909 - DNA, 21 bp, Artificial Sequence
  source: /note="Description of Artificial Sequence: Synthetic oligonucleotide"
  source: /note="Description of Combined DNA/RNA Molecule: Synthetic oligonucleotide"
auaacucacuauaauuacutt

SEQ ID NO: 1910 - DNA, 21 bp, Artificial Sequence
  source: /note="Description of Artificial Sequence: Synthetic oligonucleotide"
  source: /note="Description of Combined DNA/RNA Molecule: Synthetic oligonucleotide"
aacucacuauaauuacuugtt

SEQ ID NO: 1911 - DNA, 21 bp, Artificial Sequence
  source: /note="Description of Artificial Sequence: Synthetic oligonucleotide"
  source: /note="Description of Combined DNA/RNA Molecule: Synthetic oligonucleotide"
acucacuauaauuacuugatt

SEQ ID NO: 1912 - DNA, 21 bp, Artificial Sequence
  source: /note="Description of Artificial Sequence: Synthetic oligonucleotide"
  source: /note="Description of Combined DNA/RNA Molecule: Synthetic oligonucleotide"
cucacuauaauuacuugautt

SEQ ID NO: 1913 - DNA, 21 bp, Artificial Sequence
  source: /note="Description of Artificial Sequence: Synthetic oligonucleotide"
  source: /note="Description of Combined DNA/RNA Molecule: Synthetic oligonucleotide"
ucacuauaauuacuugauutt

SEQ ID NO: 1914 - DNA, 21 bp, Artificial Sequence
  source: /note="Description of Artificial Sequence: Synthetic oligonucleotide"
  source: /note="Description of Combined DNA/RNA Molecule: Synthetic oligonucleotide"
acuauaauuacuugauuuutt

SEQ ID NO: 1915 - DNA, 21 bp, Artificial Sequence
  source: /note="Description of Artificial Sequence: Synthetic oligonucleotide"
  source: /note="Description of Combined DNA/RNA Molecule: Synthetic oligonucleotide"
cuauaauuacuugauuuuatt

SEQ ID NO: 1916 - DNA, 21 bp, Artificial Sequence
  source: /note="Description of Artificial Sequence: Synthetic oligonucleotide"
  source: /note="Description of Combined DNA/RNA Molecule: Synthetic oligonucleotide"
uauaauuacuugauuuuautt

SEQ ID NO: 1917 - DNA, 21 bp, Artificial Sequence
  source: /note="Description of Artificial Sequence: Synthetic oligonucleotide"
  source: /note="Description of Combined DNA/RNA Molecule: Synthetic oligonucleotide"
auaauuacuugauuuuauctt

SEQ ID NO: 1918 - DNA, 21 bp, Artificial Sequence
  source: /note="Description of Artificial Sequence: Synthetic oligonucleotide"
  source: /note="Description of Combined DNA/RNA Molecule: Synthetic oligonucleotide"
uaauuacuugauuuuaucctt

SEQ ID NO: 1919 - DNA, 21 bp, Artificial Sequence
  source: /note="Description of Artificial Sequence: Synthetic oligonucleotide"
  source: /note="Description of Combined DNA/RNA Molecule: Synthetic oligonucleotide"
aauuacuugauuuuauccatt

SEQ ID NO: 1920 - DNA, 21 bp, Artificial Sequence
  source: /note="Description of Artificial Sequence: Synthetic oligonucleotide"
  source: /note="Description of Combined DNA/RNA Molecule: Synthetic oligonucleotide"
auuacuugauuuuauccaatt

SEQ ID NO: 1921 - DNA, 21 bp, Artificial Sequence
  source: /note="Description of Artificial Sequence: Synthetic oligonucleotide"
  source: /note="Description of Combined DNA/RNA Molecule: Synthetic oligonucleotide"
uuauccaagggcaaaauuatt

SEQ ID NO: 1922 - DNA, 21 bp, Artificial Sequence
  source: /note="Description of Artificial Sequence: Synthetic oligonucleotide"
  source: /note="Description of Combined DNA/RNA Molecule: Synthetic oligonucleotide"
gcaaaauuauccacuuuggtt

SEQ ID NO: 1923 - DNA, 21 bp, Artificial Sequence
  source: /note="Description of Artificial Sequence: Synthetic oligonucleotide"
  source: /note="Description of Combined DNA/RNA Molecule: Synthetic oligonucleotide"
cacuuuggcacgagggagatt

SEQ ID NO: 1924 - DNA, 21 bp, Artificial Sequence
  source: /note="Description of Artificial Sequence: Synthetic oligonucleotide"
  source: /note="Description of Combined DNA/RNA Molecule: Synthetic oligonucleotide"
cgagggagaaauuuucagatt

SEQ ID NO: 1925 - DNA, 21 bp, Artificial Sequence
  source: /note="Description of Artificial Sequence: Synthetic oligonucleotide"
  source: /note="Description of Combined DNA/RNA Molecule: Synthetic oligonucleotide"
auuuucagaugcaucuuautt

SEQ ID NO: 1926 - DNA, 21 bp, Artificial Sequence
  source: /note="Description of Artificial Sequence: Synthetic oligonucleotide"
  source: /note="Description of Combined DNA/RNA Molecule: Synthetic oligonucleotide"
gcaucuuaucaaaguauaatt

SEQ ID NO: 1927 - DNA, 21 bp, Artificial Sequence
  source: /note="Description of Artificial Sequence: Synthetic oligonucleotide"
  source: /note="Description of Combined DNA/RNA Molecule: Synthetic oligonucleotide"
caaaguauaaacauuccagtt

SEQ ID NO: 1928 - DNA, 21 bp, Artificial Sequence
  source: /note="Description of Artificial Sequence: Synthetic oligonucleotide"
  source: /note="Description of Combined DNA/RNA Molecule: Synthetic oligonucleotide"
auuccaguaacacagaacatt

SEQ ID NO: 1929 - DNA, 21 bp, Artificial Sequence
  source: /note="Description of Artificial Sequence: Synthetic oligonucleotide"
  source: /note="Description of Combined DNA/RNA Molecule: Synthetic oligonucleotide"
cacagaacaugguuccuuctt

SEQ ID NO: 1930 - DNA, 21 bp, Artificial Sequence
  source: /note="Description of Artificial Sequence: Synthetic oligonucleotide"
  source: /note="Description of Combined DNA/RNA Molecule: Synthetic oligonucleotide"
gguuccuucaucccgacuutt

SEQ ID NO: 1931 - DNA, 21 bp, Artificial Sequence
  source: /note="Description of Artificial Sequence: Synthetic oligonucleotide"
  source: /note="Description of Combined DNA/RNA Molecule: Synthetic oligonucleotide"
cccgacuucuggucuauuatt

SEQ ID NO: 1932 - DNA, 21 bp, Artificial Sequence
  source: /note="Description of Artificial Sequence: Synthetic oligonucleotide"
  source: /note="Description of Combined DNA/RNA Molecule: Synthetic oligonucleotide"
ggucuauuacaucgucacatt

SEQ ID NO: 1933 - DNA, 21 bp, Artificial Sequence
  source: /note="Description of Artificial Sequence: Synthetic oligonucleotide"
  source: /note="Description of Combined DNA/RNA Molecule: Synthetic oligonucleotide"
aucgucacaggagaacagatt

SEQ ID NO: 1934 - DNA, 21 bp, Artificial Sequence
  source: /note="Description of Artificial Sequence: Synthetic oligonucleotide"
  source: /note="Description of Combined DNA/RNA Molecule: Synthetic oligonucleotide"
caggagaacagacagcagatt

SEQ ID NO: 1935 - DNA, 21 bp, Artificial Sequence
  source: /note="Description of Artificial Sequence: Synthetic oligonucleotide"
  source: /note="Description of Combined DNA/RNA Molecule: Synthetic oligonucleotide"
cagcagaauuagugucugatt

SEQ ID NO: 1936 - DNA, 21 bp, Artificial Sequence
  source: /note="Description of Artificial Sequence: Synthetic oligonucleotide"
  source: /note="Description of Combined DNA/RNA Molecule: Synthetic oligonucleotide"
gugucugauucagucuggutt

SEQ ID NO: 1937 - DNA, 21 bp, Artificial Sequence
  source: /note="Description of Artificial Sequence: Synthetic oligonucleotide"
  source: /note="Description of Combined DNA/RNA Molecule: Synthetic oligonucleotide"
cagucugguuaaauauugatt

SEQ ID NO: 1938 - DNA, 21 bp, Artificial Sequence
  source: /note="Description of Artificial Sequence: Synthetic oligonucleotide"
  source: /note="Description of Combined DNA/RNA Molecule: Synthetic oligonucleotide"
guuaaauauugaagaaaaatt

SEQ ID NO: 1939 - DNA, 21 bp, Artificial Sequence
  source: /note="Description of Artificial Sequence: Synthetic oligonucleotide"
  source: /note="Description of Combined DNA/RNA Molecule: Synthetic oligonucleotide"
agaaaaauguggcaaccagtt

SEQ ID NO: 1940 - DNA, 21 bp, Artificial Sequence
  source: /note="Description of Artificial Sequence: Synthetic oligonucleotide"
  source: /note="Description of Combined DNA/RNA Molecule: Synthetic oligonucleotide"
gcaaccagcuccagguucatt

SEQ ID NO: 1941 - DNA, 21 bp, Artificial Sequence
  source: /note="Description of Artificial Sequence: Synthetic oligonucleotide"
  source: /note="Description of Combined DNA/RNA Molecule: Synthetic oligonucleotide"
gcuccagguucaucugucutt

SEQ ID NO: 1942 - DNA, 21 bp, Artificial Sequence
  source: /note="Description of Artificial Sequence: Synthetic oligonucleotide"
  source: /note="Description of Combined DNA/RNA Molecule: Synthetic oligonucleotide"
aucugucuccugaugcagatt

SEQ ID NO: 1943 - DNA, 21 bp, Artificial Sequence
  source: /note="Description of Artificial Sequence: Synthetic oligonucleotide"
  source: /note="Description of Combined DNA/RNA Molecule: Synthetic oligonucleotide"
gaugcagaugcauauucuctt

SEQ ID NO: 1944 - DNA, 21 bp, Artificial Sequence
  source: /note="Description of Artificial Sequence: Synthetic oligonucleotide"
  source: /note="Description of Combined DNA/RNA Molecule: Synthetic oligonucleotide"
gcauauucuccaggccaaatt

SEQ ID NO: 1945 - DNA, 21 bp, Artificial Sequence
  source: /note="Description of Artificial Sequence: Synthetic oligonucleotide"
  source: /note="Description of Combined DNA/RNA Molecule: Synthetic oligonucleotide"
aggccaaacugugucucuutt

SEQ ID NO: 1946 - DNA, 21 bp, Artificial Sequence
  source: /note="Description of Artificial Sequence: Synthetic oligonucleotide"
  source: /note="Description of Combined DNA/RNA Molecule: Synthetic oligonucleotide"
gugucucuuaauauggcaatt

SEQ ID NO: 1947 - DNA, 21 bp, Artificial Sequence
  source: /note="Description of Artificial Sequence: Synthetic oligonucleotide"
  source: /note="Description of Combined DNA/RNA Molecule: Synthetic oligonucleotide"
uuaauauggcaacuggaautt

SEQ ID NO: 1948 - DNA, 21 bp, Artificial Sequence
  source: /note="Description of Artificial Sequence: Synthetic oligonucleotide"
  source: /note="Description of Combined DNA/RNA Molecule: Synthetic oligonucleotide"
aacuggaauggauuccuggtt

SEQ ID NO: 1949 - DNA, 21 bp, Artificial Sequence
  source: /note="Description of Artificial Sequence: Synthetic oligonucleotide"
  source: /note="Description of Combined DNA/RNA Molecule: Synthetic oligonucleotide"
uuccuggguggcauuagcatt

SEQ ID NO: 1950 - DNA, 21 bp, Artificial Sequence
  source: /note="Description of Artificial Sequence: Synthetic oligonucleotide"
  source: /note="Description of Combined DNA/RNA Molecule: Synthetic oligonucleotide"
ggcauuagcagcaguggactt

SEQ ID NO: 1951 - DNA, 21 bp, Artificial Sequence
  source: /note="Description of Artificial Sequence: Synthetic oligonucleotide"
  source: /note="Description of Combined DNA/RNA Molecule: Synthetic oligonucleotide"
aguggacagugcuguguautt

SEQ ID NO: 1952 - DNA, 21 bp, Artificial Sequence
  source: /note="Description of Artificial Sequence: Synthetic oligonucleotide"
  source: /note="Description of Combined DNA/RNA Molecule: Synthetic oligonucleotide"
gcuguguauggaguccaaatt

SEQ ID NO: 1953 - DNA, 21 bp, Artificial Sequence
  source: /note="Description of Artificial Sequence: Synthetic oligonucleotide"
  source: /note="Description of Combined DNA/RNA Molecule: Synthetic oligonucleotide"
aguccaaagaggagccaaatt

SEQ ID NO: 1954 - DNA, 21 bp, Artificial Sequence
  source: /note="Description of Artificial Sequence: Synthetic oligonucleotide"
  source: /note="Description of Combined DNA/RNA Molecule: Synthetic oligonucleotide"
agaggagccaaaaagcccutt

SEQ ID NO: 1955 - DNA, 21 bp, Artificial Sequence
  source: /note="Description of Artificial Sequence: Synthetic oligonucleotide"
  source: /note="Description of Combined DNA/RNA Molecule: Synthetic oligonucleotide"
agcccuuggaaagaguauutt

SEQ ID NO: 1956 - DNA, 21 bp, Artificial Sequence
  source: /note="Description of Artificial Sequence: Synthetic oligonucleotide"
  source: /note="Description of Combined DNA/RNA Molecule: Synthetic oligonucleotide"
aagaguauuucaauucuuatt

SEQ ID NO: 1957 - DNA, 21 bp, Artificial Sequence
  source: /note="Description of Artificial Sequence: Synthetic oligonucleotide"
  source: /note="Description of Combined DNA/RNA Molecule: Synthetic oligonucleotide"
uuucaauucuuagagaagatt

SEQ ID NO: 1958 - DNA, 21 bp, Artificial Sequence
  source: /note="Description of Artificial Sequence: Synthetic oligonucleotide"
  source: /note="Description of Combined DNA/RNA Molecule: Synthetic oligonucleotide"
gagaagagugaucugggcutt

SEQ ID NO: 1959 - DNA, 21 bp, Artificial Sequence
  source: /note="Description of Artificial Sequence: Synthetic oligonucleotide"
  source: /note="Description of Combined DNA/RNA Molecule: Synthetic oligonucleotide"
ugaucugggcuguggggcatt

SEQ ID NO: 1960 - DNA, 21 bp, Artificial Sequence
  source: /note="Description of Artificial Sequence: Synthetic oligonucleotide"
  source: /note="Description of Combined DNA/RNA Molecule: Synthetic oligonucleotide"
ggggcaggugguggccucatt

SEQ ID NO: 1961 - DNA, 21 bp, Artificial Sequence
  source: /note="Description of Artificial Sequence: Synthetic oligonucleotide"
  source: /note="Description of Combined DNA/RNA Molecule: Synthetic oligonucleotide"
guggccucaacaaugccaatt

SEQ ID NO: 1962 - DNA, 21 bp, Artificial Sequence
  source: /note="Description of Artificial Sequence: Synthetic oligonucleotide"
  source: /note="Description of Combined DNA/RNA Molecule: Synthetic oligonucleotide"
caacaaugccaauguguuctt

SEQ ID NO: 1963 - DNA, 21 bp, Artificial Sequence
  source: /note="Description of Artificial Sequence: Synthetic oligonucleotide"
  source: /note="Description of Combined DNA/RNA Molecule: Synthetic oligonucleotide"
caauguguuccaccuagcutt

SEQ ID NO: 1964 - DNA, 21 bp, Artificial Sequence
  source: /note="Description of Artificial Sequence: Synthetic oligonucleotide"
  source: /note="Description of Combined DNA/RNA Molecule: Synthetic oligonucleotide"
caccuagcuggacuuaccutt

SEQ ID NO: 1965 - DNA, 21 bp, Artificial Sequence
  source: /note="Description of Artificial Sequence: Synthetic oligonucleotide"
  source: /note="Description of Combined DNA/RNA Molecule: Synthetic oligonucleotide"
gacuuaccuuccucacuaatt

SEQ ID NO: 1966 - DNA, 21 bp, Artificial Sequence
  source: /note="Description of Artificial Sequence: Synthetic oligonucleotide"
  source: /note="Description of Combined DNA/RNA Molecule: Synthetic oligonucleotide"
ucacuaaugcaaaugcagatt

SEQ ID NO: 1967 - DNA, 21 bp, Artificial Sequence
  source: /note="Description of Artificial Sequence: Synthetic oligonucleotide"
  source: /note="Description of Combined DNA/RNA Molecule: Synthetic oligonucleotide"
aaaugcagaugacucccaatt

SEQ ID NO: 1968 - DNA, 21 bp, Artificial Sequence
  source: /note="Description of Artificial Sequence: Synthetic oligonucleotide"
  source: /note="Description of Combined DNA/RNA Molecule: Synthetic oligonucleotide"
cucccaagaaaaugaugaatt

SEQ ID NO: 1969 - DNA, 21 bp, Artificial Sequence
  source: /note="Description of Artificial Sequence: Synthetic oligonucleotide"
  source: /note="Description of Combined DNA/RNA Molecule: Synthetic oligonucleotide"
ccuuguaaagaaauucucatt

SEQ ID NO: 1970 - DNA, 21 bp, Artificial Sequence
  source: /note="Description of Artificial Sequence: Synthetic oligonucleotide"
  source: /note="Description of Combined DNA/RNA Molecule: Synthetic oligonucleotide"
aauucucaggccaagaagatt

SEQ ID NO: 1971 - DNA, 21 bp, Artificial Sequence
  source: /note="Description of Artificial Sequence: Synthetic oligonucleotide"
  source: /note="Description of Combined DNA/RNA Molecule: Synthetic oligonucleotide"
ccaagaagaacgcugcaaatt

SEQ ID NO: 1972 - DNA, 21 bp, Artificial Sequence
  source: /note="Description of Artificial Sequence: Synthetic oligonucleotide"
  source: /note="Description of Combined DNA/RNA Molecule: Synthetic oligonucleotide"
cgcugcaaaagaagauagatt

SEQ ID NO: 1973 - DNA, 21 bp, Artificial Sequence
  source: /note="Description of Artificial Sequence: Synthetic oligonucleotide"
  source: /note="Description of Combined DNA/RNA Molecule: Synthetic oligonucleotide"
aaagaagauagaagaaauatt

SEQ ID NO: 1974 - DNA, 21 bp, Artificial Sequence
  source: /note="Description of Artificial Sequence: Synthetic oligonucleotide"
  source: /note="Description of Combined DNA/RNA Molecule: Synthetic oligonucleotide"
agaaauagcugcuaaauautt

SEQ ID NO: 1975 - DNA, 21 bp, Artificial Sequence
  source: /note="Description of Artificial Sequence: Synthetic oligonucleotide"
  source: /note="Description of Combined DNA/RNA Molecule: Synthetic oligonucleotide"
gcugcuaaauauaaacauutt

SEQ ID NO: 1976 - DNA, 21 bp, Artificial Sequence
  source: /note="Description of Artificial Sequence: Synthetic oligonucleotide"
  source: /note="Description of Combined DNA/RNA Molecule: Synthetic oligonucleotide"
acauucaguagugaagaaatt

SEQ ID NO: 1977 - DNA, 21 bp, Artificial Sequence
  source: /note="Description of Artificial Sequence: Synthetic oligonucleotide"
  source: /note="Description of Combined DNA/RNA Molecule: Synthetic oligonucleotide"
guagugaagaaauguuguutt

SEQ ID NO: 1978 - DNA, 21 bp, Artificial Sequence
  source: /note="Description of Artificial Sequence: Synthetic oligonucleotide"
  source: /note="Description of Combined DNA/RNA Molecule: Synthetic oligonucleotide"
aaauguuguuacgauggagtt

SEQ ID NO: 1979 - DNA, 21 bp, Artificial Sequence
  source: /note="Description of Artificial Sequence: Synthetic oligonucleotide"
  source: /note="Description of Combined DNA/RNA Molecule: Synthetic oligonucleotide"
cgauggagccugcguuaautt

SEQ ID NO: 1980 - DNA, 21 bp, Artificial Sequence
  source: /note="Description of Artificial Sequence: Synthetic oligonucleotide"
  source: /note="Description of Combined DNA/RNA Molecule: Synthetic oligonucleotide"
cguuaauaaugaugaaacctt

SEQ ID NO: 1981 - DNA, 21 bp, Artificial Sequence
  source: /note="Description of Artificial Sequence: Synthetic oligonucleotide"
  source: /note="Description of Combined DNA/RNA Molecule: Synthetic oligonucleotide"
augaugaaaccugugagcatt

SEQ ID NO: 1982 - DNA, 21 bp, Artificial Sequence
  source: /note="Description of Artificial Sequence: Synthetic oligonucleotide"
  source: /note="Description of Combined DNA/RNA Molecule: Synthetic oligonucleotide"
cugugagcagcgagcugcatt

SEQ ID NO: 1983 - DNA, 21 bp, Artificial Sequence
  source: /note="Description of Artificial Sequence: Synthetic oligonucleotide"
  source: /note="Description of Combined DNA/RNA Molecule: Synthetic oligonucleotide"
cgagcugcacggauuaguutt

SEQ ID NO: 1984 - DNA, 21 bp, Artificial Sequence
  source: /note="Description of Artificial Sequence: Synthetic oligonucleotide"
  source: /note="Description of Combined DNA/RNA Molecule: Synthetic oligonucleotide"
ggauuaguuuagggccaagtt

SEQ ID NO: 1985 - DNA, 21 bp, Artificial Sequence
  source: /note="Description of Artificial Sequence: Synthetic oligonucleotide"
  source: /note="Description of Combined DNA/RNA Molecule: Synthetic oligonucleotide"
gggccaagaugcaucaaagtt

SEQ ID NO: 1986 - DNA, 21 bp, Artificial Sequence
  source: /note="Description of Artificial Sequence: Synthetic oligonucleotide"
  source: /note="Description of Combined DNA/RNA Molecule: Synthetic oligonucleotide"
caucaaagcuuucacugaatt

SEQ ID NO: 1987 - DNA, 21 bp, Artificial Sequence
  source: /note="Description of Artificial Sequence: Synthetic oligonucleotide"
  source: /note="Description of Combined DNA/RNA Molecule: Synthetic oligonucleotide"
gcuuucacugaauguugugtt

SEQ ID NO: 1988 - DNA, 21 bp, Artificial Sequence
  source: /note="Description of Artificial Sequence: Synthetic oligonucleotide"
  source: /note="Description of Combined DNA/RNA Molecule: Synthetic oligonucleotide"
aauguugugucgucgcaagtt

SEQ ID NO: 1989 - DNA, 21 bp, Artificial Sequence
  source: /note="Description of Artificial Sequence: Synthetic oligonucleotide"
  source: /note="Description of Combined DNA/RNA Molecule: Synthetic oligonucleotide"
cgucgcaagccagcuccgutt

SEQ ID NO: 1990 - DNA, 21 bp, Artificial Sequence
  source: /note="Description of Artificial Sequence: Synthetic oligonucleotide"
  source: /note="Description of Combined DNA/RNA Molecule: Synthetic oligonucleotide"
gcuccgugcuaauaucucutt

SEQ ID NO: 1991 - DNA, 21 bp, Artificial Sequence
  source: /note="Description of Artificial Sequence: Synthetic oligonucleotide"
  source: /note="Description of Combined DNA/RNA Molecule: Synthetic oligonucleotide"
cuaauaucucucauaaagatt

SEQ ID NO: 1992 - DNA, 21 bp, Artificial Sequence
  source: /note="Description of Artificial Sequence: Synthetic oligonucleotide"
  source: /note="Description of Combined DNA/RNA Molecule: Synthetic oligonucleotide"
aaagacaugcaauugggaatt

SEQ ID NO: 1993 - DNA, 21 bp, Artificial Sequence
  source: /note="Description of Artificial Sequence: Synthetic oligonucleotide"
  source: /note="Description of Combined DNA/RNA Molecule: Synthetic oligonucleotide"
caauugggaaggcuacacatt

SEQ ID NO: 1994 - DNA, 21 bp, Artificial Sequence
  source: /note="Description of Artificial Sequence: Synthetic oligonucleotide"
  source: /note="Description of Combined DNA/RNA Molecule: Synthetic oligonucleotide"
gcuacacaugaagacccugtt

SEQ ID NO: 1995 - DNA, 21 bp, Artificial Sequence
  source: /note="Description of Artificial Sequence: Synthetic oligonucleotide"
  source: /note="Description of Combined DNA/RNA Molecule: Synthetic oligonucleotide"
caugaagacccuguuaccatt

SEQ ID NO: 1996 - DNA, 21 bp, Artificial Sequence
  source: /note="Description of Artificial Sequence: Synthetic oligonucleotide"
  source: /note="Description of Combined DNA/RNA Molecule: Synthetic oligonucleotide"
uaccaguaagcaagccagatt

SEQ ID NO: 1997 - DNA, 21 bp, Artificial Sequence
  source: /note="Description of Artificial Sequence: Synthetic oligonucleotide"
  source: /note="Description of Combined DNA/RNA Molecule: Synthetic oligonucleotide"
agcaagccagaaauucggatt

SEQ ID NO: 1998 - DNA, 21 bp, Artificial Sequence
  source: /note="Description of Artificial Sequence: Synthetic oligonucleotide"
  source: /note="Description of Combined DNA/RNA Molecule: Synthetic oligonucleotide"
agaaauucggaguuauuuutt

SEQ ID NO: 1999 - DNA, 21 bp, Artificial Sequence
  source: /note="Description of Artificial Sequence: Synthetic oligonucleotide"
  source: /note="Description of Combined DNA/RNA Molecule: Synthetic oligonucleotide"
aguuauuuuccagaaagcutt

SEQ ID NO: 2000 - DNA, 21 bp, Artificial Sequence
  source: /note="Description of Artificial Sequence: Synthetic oligonucleotide"
  source: /note="Description of Combined DNA/RNA Molecule: Synthetic oligonucleotide"
cagaaagcugguugugggatt

SEQ ID NO: 2001 - DNA, 21 bp, Artificial Sequence
  source: /note="Description of Artificial Sequence: Synthetic oligonucleotide"
  source: /note="Description of Combined DNA/RNA Molecule: Synthetic oligonucleotide"
gugggaaguucaucuuguutt

SEQ ID NO: 2002 - DNA, 21 bp, Artificial Sequence
  source: /note="Description of Artificial Sequence: Synthetic oligonucleotide"
  source: /note="Description of Combined DNA/RNA Molecule: Synthetic oligonucleotide"
ucaucuuguucccagaagatt

SEQ ID NO: 2003 - DNA, 21 bp, Artificial Sequence
  source: /note="Description of Artificial Sequence: Synthetic oligonucleotide"
  source: /note="Description of Combined DNA/RNA Molecule: Synthetic oligonucleotide"
ccagaagaaaacaguugcatt

SEQ ID NO: 2004 - DNA, 21 bp, Artificial Sequence
  source: /note="Description of Artificial Sequence: Synthetic oligonucleotide"
  source: /note="Description of Combined DNA/RNA Molecule: Synthetic oligonucleotide"
caguugcaguuugcccuactt

SEQ ID NO: 2005 - DNA, 21 bp, Artificial Sequence
  source: /note="Description of Artificial Sequence: Synthetic oligonucleotide"
  source: /note="Description of Combined DNA/RNA Molecule: Synthetic oligonucleotide"
caguuugcccuaccugauutt

SEQ ID NO: 2006 - DNA, 21 bp, Artificial Sequence
  source: /note="Description of Artificial Sequence: Synthetic oligonucleotide"
  source: /note="Description of Combined DNA/RNA Molecule: Synthetic oligonucleotide"
ccugauucucuaaccaccutt

SEQ ID NO: 2007 - DNA, 21 bp, Artificial Sequence
  source: /note="Description of Artificial Sequence: Synthetic oligonucleotide"
  source: /note="Description of Combined DNA/RNA Molecule: Synthetic oligonucleotide"
accaccugggaaauucaagtt

SEQ ID NO: 2008 - DNA, 21 bp, Artificial Sequence
  source: /note="Description of Artificial Sequence: Synthetic oligonucleotide"
  source: /note="Description of Combined DNA/RNA Molecule: Synthetic oligonucleotide"
gaaauucaaggcguuggcatt

SEQ ID NO: 2009 - DNA, 21 bp, Artificial Sequence
  source: /note="Description of Artificial Sequence: Synthetic oligonucleotide"
  source: /note="Description of Combined DNA/RNA Molecule: Synthetic oligonucleotide"
cguuggcauuucaaacacutt

SEQ ID NO: 2010 - DNA, 21 bp, Artificial Sequence
  source: /note="Description of Artificial Sequence: Synthetic oligonucleotide"
  source: /note="Description of Combined DNA/RNA Molecule: Synthetic oligonucleotide"
cauuucaaacacugguauatt

SEQ ID NO: 2011 - DNA, 21 bp, Artificial Sequence
  source: /note="Description of Artificial Sequence: Synthetic oligonucleotide"
  source: /note="Description of Combined DNA/RNA Molecule: Synthetic oligonucleotide"
guauauguguugcugauactt

SEQ ID NO: 2012 - DNA, 21 bp, Artificial Sequence
  source: /note="Description of Artificial Sequence: Synthetic oligonucleotide"
  source: /note="Description of Combined DNA/RNA Molecule: Synthetic oligonucleotide"
ugcugauacugucaaggcatt

SEQ ID NO: 2013 - DNA, 21 bp, Artificial Sequence
  source: /note="Description of Artificial Sequence: Synthetic oligonucleotide"
  source: /note="Description of Combined DNA/RNA Molecule: Synthetic oligonucleotide"
cugucaaggcaaagguguutt

SEQ ID NO: 2014 - DNA, 21 bp, Artificial Sequence
  source: /note="Description of Artificial Sequence: Synthetic oligonucleotide"
  source: /note="Description of Combined DNA/RNA Molecule: Synthetic oligonucleotide"
agguguucaaagaugucuutt

SEQ ID NO: 2015 - DNA, 21 bp, Artificial Sequence
  source: /note="Description of Artificial Sequence: Synthetic oligonucleotide"
  source: /note="Description of Combined DNA/RNA Molecule: Synthetic oligonucleotide"
caaagaugucuuccuggaatt

SEQ ID NO: 2016 - DNA, 21 bp, Artificial Sequence
  source: /note="Description of Artificial Sequence: Synthetic oligonucleotide"
  source: /note="Description of Combined DNA/RNA Molecule: Synthetic oligonucleotide"
cuuccuggaaaugaauauatt

SEQ ID NO: 2017 - DNA, 21 bp, Artificial Sequence
  source: /note="Description of Artificial Sequence: Synthetic oligonucleotide"
  source: /note="Description of Combined DNA/RNA Molecule: Synthetic oligonucleotide"
gaauauaccauauucuguutt

SEQ ID NO: 2018 - DNA, 21 bp, Artificial Sequence
  source: /note="Description of Artificial Sequence: Synthetic oligonucleotide"
  source: /note="Description of Combined DNA/RNA Molecule: Synthetic oligonucleotide"
auauucuguuguacgaggatt

SEQ ID NO: 2019 - DNA, 21 bp, Artificial Sequence
  source: /note="Description of Artificial Sequence: Synthetic oligonucleotide"
  source: /note="Description of Combined DNA/RNA Molecule: Synthetic oligonucleotide"
cgaggagaacagauccaautt

SEQ ID NO: 2020 - DNA, 21 bp, Artificial Sequence
  source: /note="Description of Artificial Sequence: Synthetic oligonucleotide"
  source: /note="Description of Combined DNA/RNA Molecule: Synthetic oligonucleotide"
gaacagauccaauugaaagtt

SEQ ID NO: 2021 - DNA, 21 bp, Artificial Sequence
  source: /note="Description of Artificial Sequence: Synthetic oligonucleotide"
  source: /note="Description of Combined DNA/RNA Molecule: Synthetic oligonucleotide"
gaaaggaacuguuuacaactt

SEQ ID NO: 2022 - DNA, 21 bp, Artificial Sequence
  source: /note="Description of Artificial Sequence: Synthetic oligonucleotide"
  source: /note="Description of Combined DNA/RNA Molecule: Synthetic oligonucleotide"
acuguuuacaacuauaggatt

SEQ ID NO: 2023 - DNA, 21 bp, Artificial Sequence
  source: /note="Description of Artificial Sequence: Synthetic oligonucleotide"
  source: /note="Description of Combined DNA/RNA Molecule: Synthetic oligonucleotide"
aacuauaggacuucugggatt

SEQ ID NO: 2024 - DNA, 21 bp, Artificial Sequence
  source: /note="Description of Artificial Sequence: Synthetic oligonucleotide"
  source: /note="Description of Combined DNA/RNA Molecule: Synthetic oligonucleotide"
ugggaugcaguucuguguutt

SEQ ID NO: 2025 - DNA, 21 bp, Artificial Sequence
  source: /note="Description of Artificial Sequence: Synthetic oligonucleotide"
  source: /note="Description of Combined DNA/RNA Molecule: Synthetic oligonucleotide"
guucuguguuaaaaugucutt

SEQ ID NO: 2026 - DNA, 21 bp, Artificial Sequence
  source: /note="Description of Artificial Sequence: Synthetic oligonucleotide"
  source: /note="Description of Combined DNA/RNA Molecule: Synthetic oligonucleotide"
uuaaaaugucugcuguggatt

SEQ ID NO: 2027 - DNA, 21 bp, Artificial Sequence
  source: /note="Description of Artificial Sequence: Synthetic oligonucleotide"
  source: /note="Description of Combined DNA/RNA Molecule: Synthetic oligonucleotide"
cuguggagggaaucugcactt

SEQ ID NO: 2028 - DNA, 21 bp, Artificial Sequence
  source: /note="Description of Artificial Sequence: Synthetic oligonucleotide"
  source: /note="Description of Combined DNA/RNA Molecule: Synthetic oligonucleotide"
ggaaucugcacuucggaaatt

SEQ ID NO: 2029 - DNA, 21 bp, Artificial Sequence
  source: /note="Description of Artificial Sequence: Synthetic oligonucleotide"
  source: /note="Description of Combined DNA/RNA Molecule: Synthetic oligonucleotide"
cggaaagcccagucauugatt

SEQ ID NO: 2030 - DNA, 21 bp, Artificial Sequence
  source: /note="Description of Artificial Sequence: Synthetic oligonucleotide"
  source: /note="Description of Combined DNA/RNA Molecule: Synthetic oligonucleotide"
ccagucauugaucaucaggtt

SEQ ID NO: 2031 - DNA, 21 bp, Artificial Sequence
  source: /note="Description of Artificial Sequence: Synthetic oligonucleotide"
  source: /note="Description of Combined DNA/RNA Molecule: Synthetic oligonucleotide"
caucagggcacaaaguccutt

SEQ ID NO: 2032 - DNA, 21 bp, Artificial Sequence
  source: /note="Description of Artificial Sequence: Synthetic oligonucleotide"
  source: /note="Description of Combined DNA/RNA Molecule: Synthetic oligonucleotide"
ggcacaaaguccuccaaautt

SEQ ID NO: 2033 - DNA, 21 bp, Artificial Sequence
  source: /note="Description of Artificial Sequence: Synthetic oligonucleotide"
  source: /note="Description of Combined DNA/RNA Molecule: Synthetic oligonucleotide"
caaaugugugcgccagaaatt

SEQ ID NO: 2034 - DNA, 21 bp, Artificial Sequence
  source: /note="Description of Artificial Sequence: Synthetic oligonucleotide"
  source: /note="Description of Combined DNA/RNA Molecule: Synthetic oligonucleotide"
gcgccagaaaguagagggctt

SEQ ID NO: 2035 - DNA, 21 bp, Artificial Sequence
  source: /note="Description of Artificial Sequence: Synthetic oligonucleotide"
  source: /note="Description of Combined DNA/RNA Molecule: Synthetic oligonucleotide"
aguagagggcuccuccagutt

SEQ ID NO: 2036 - DNA, 21 bp, Artificial Sequence
  source: /note="Description of Artificial Sequence: Synthetic oligonucleotide"
  source: /note="Description of Combined DNA/RNA Molecule: Synthetic oligonucleotide"
ccuccagucacuuggugactt

SEQ ID NO: 2037 - DNA, 21 bp, Artificial Sequence
  source: /note="Description of Artificial Sequence: Synthetic oligonucleotide"
  source: /note="Description of Combined DNA/RNA Molecule: Synthetic oligonucleotide"
ucacuuggugacauucacutt

SEQ ID NO: 2038 - DNA, 21 bp, Artificial Sequence
  source: /note="Description of Artificial Sequence: Synthetic oligonucleotide"
  source: /note="Description of Combined DNA/RNA Molecule: Synthetic oligonucleotide"
cauucacugugcuuccucutt

SEQ ID NO: 2039 - DNA, 21 bp, Artificial Sequence
  source: /note="Description of Artificial Sequence: Synthetic oligonucleotide"
  source: /note="Description of Combined DNA/RNA Molecule: Synthetic oligonucleotide"
ggaaauuggccuucacaactt

SEQ ID NO: 2040 - DNA, 21 bp, Artificial Sequence
  source: /note="Description of Artificial Sequence: Synthetic oligonucleotide"
  source: /note="Description of Combined DNA/RNA Molecule: Synthetic oligonucleotide"
cuucacaacaucaauuuuutt

SEQ ID NO: 2041 - DNA, 21 bp, Artificial Sequence
  source: /note="Description of Artificial Sequence: Synthetic oligonucleotide"
  source: /note="Description of Combined DNA/RNA Molecule: Synthetic oligonucleotide"
aauuuuucacuggagacuutt

SEQ ID NO: 2042 - DNA, 21 bp, Artificial Sequence
  source: /note="Description of Artificial Sequence: Synthetic oligonucleotide"
  source: /note="Description of Combined DNA/RNA Molecule: Synthetic oligonucleotide"
cuggagacuugguuuggaatt

SEQ ID NO: 2043 - DNA, 21 bp, Artificial Sequence
  source: /note="Description of Artificial Sequence: Synthetic oligonucleotide"
  source: /note="Description of Combined DNA/RNA Molecule: Synthetic oligonucleotide"
gguuuggaaaagaaaucuutt

SEQ ID NO: 2044 - DNA, 21 bp, Artificial Sequence
  source: /note="Description of Artificial Sequence: Synthetic oligonucleotide"
  source: /note="Description of Combined DNA/RNA Molecule: Synthetic oligonucleotide"
aaucuuaguaaaaacauuatt

SEQ ID NO: 2045 - DNA, 21 bp, Artificial Sequence
  source: /note="Description of Artificial Sequence: Synthetic oligonucleotide"
  source: /note="Description of Combined DNA/RNA Molecule: Synthetic oligonucleotide"
aaaaacauuacgaguggugtt

SEQ ID NO: 2046 - DNA, 21 bp, Artificial Sequence
  source: /note="Description of Artificial Sequence: Synthetic oligonucleotide"
  source: /note="Description of Combined DNA/RNA Molecule: Synthetic oligonucleotide"
gaguggugccagaaggugutt

SEQ ID NO: 2047 - DNA, 21 bp, Artificial Sequence
  source: /note="Description of Artificial Sequence: Synthetic oligonucleotide"
  source: /note="Description of Combined DNA/RNA Molecule: Synthetic oligonucleotide"
agaaggugucaaaagggaatt

SEQ ID NO: 2048 - DNA, 21 bp, Artificial Sequence
  source: /note="Description of Artificial Sequence: Synthetic oligonucleotide"
  source: /note="Description of Combined DNA/RNA Molecule: Synthetic oligonucleotide"
ugucaaaagggaaagcuautt

SEQ ID NO: 2049 - DNA, 21 bp, Artificial Sequence
  source: /note="Description of Artificial Sequence: Synthetic oligonucleotide"
  source: /note="Description of Combined DNA/RNA Molecule: Synthetic oligonucleotide"
gcuauucugguguuacuuutt

SEQ ID NO: 2050 - DNA, 21 bp, Artificial Sequence
  source: /note="Description of Artificial Sequence: Synthetic oligonucleotide"
  source: /note="Description of Combined DNA/RNA Molecule: Synthetic oligonucleotide"
guguuacuuuggauccuagtt

SEQ ID NO: 2051 - DNA, 21 bp, Artificial Sequence
  source: /note="Description of Artificial Sequence: Synthetic oligonucleotide"
  source: /note="Description of Combined DNA/RNA Molecule: Synthetic oligonucleotide"
ggauccuagggguauuuautt

SEQ ID NO: 2052 - DNA, 21 bp, Artificial Sequence
  source: /note="Description of Artificial Sequence: Synthetic oligonucleotide"
  source: /note="Description of Combined DNA/RNA Molecule: Synthetic oligonucleotide"
gguauuuaugguaccauuatt

SEQ ID NO: 2053 - DNA, 21 bp, Artificial Sequence
  source: /note="Description of Artificial Sequence: Synthetic oligonucleotide"
  source: /note="Description of Combined DNA/RNA Molecule: Synthetic oligonucleotide"
guaccauuagcagacgaaatt

SEQ ID NO: 2054 - DNA, 21 bp, Artificial Sequence
  source: /note="Description of Artificial Sequence: Synthetic oligonucleotide"
  source: /note="Description of Combined DNA/RNA Molecule: Synthetic oligonucleotide"
cagacgaaaggaguucccatt

SEQ ID NO: 2055 - DNA, 21 bp, Artificial Sequence
  source: /note="Description of Artificial Sequence: Synthetic oligonucleotide"
  source: /note="Description of Combined DNA/RNA Molecule: Synthetic oligonucleotide"
aggaguucccauacaggautt

SEQ ID NO: 2056 - DNA, 21 bp, Artificial Sequence
  source: /note="Description of Artificial Sequence: Synthetic oligonucleotide"
  source: /note="Description of Combined DNA/RNA Molecule: Synthetic oligonucleotide"
cauacaggauacccuuagatt

SEQ ID NO: 2057 - DNA, 21 bp, Artificial Sequence
  source: /note="Description of Artificial Sequence: Synthetic oligonucleotide"
  source: /note="Description of Combined DNA/RNA Molecule: Synthetic oligonucleotide"
cuuagauuugguccccaaatt

SEQ ID NO: 2058 - DNA, 21 bp, Artificial Sequence
  source: /note="Description of Artificial Sequence: Synthetic oligonucleotide"
  source: /note="Description of Combined DNA/RNA Molecule: Synthetic oligonucleotide"
uccccaaaacagaaaucaatt

SEQ ID NO: 2059 - DNA, 21 bp, Artificial Sequence
  source: /note="Description of Artificial Sequence: Synthetic oligonucleotide"
  source: /note="Description of Combined DNA/RNA Molecule: Synthetic oligonucleotide"
acagaaaucaaaaggauuutt

SEQ ID NO: 2060 - DNA, 21 bp, Artificial Sequence
  source: /note="Description of Artificial Sequence: Synthetic oligonucleotide"
  source: /note="Description of Combined DNA/RNA Molecule: Synthetic oligonucleotide"
aaaggauuuugaguguaaatt

SEQ ID NO: 2061 - DNA, 21 bp, Artificial Sequence
  source: /note="Description of Artificial Sequence: Synthetic oligonucleotide"
  source: /note="Description of Combined DNA/RNA Molecule: Synthetic oligonucleotide"
aguguaaaaggacugcuugtt

SEQ ID NO: 2062 - DNA, 21 bp, Artificial Sequence
  source: /note="Description of Artificial Sequence: Synthetic oligonucleotide"
  source: /note="Description of Combined DNA/RNA Molecule: Synthetic oligonucleotide"
aaggacugcuuguaggugatt

SEQ ID NO: 2063 - DNA, 21 bp, Artificial Sequence
  source: /note="Description of Artificial Sequence: Synthetic oligonucleotide"
  source: /note="Description of Combined DNA/RNA Molecule: Synthetic oligonucleotide"
guaggugagaucuugucugtt

SEQ ID NO: 2064 - DNA, 21 bp, Artificial Sequence
  source: /note="Description of Artificial Sequence: Synthetic oligonucleotide"
  source: /note="Description of Combined DNA/RNA Molecule: Synthetic oligonucleotide"
aucuugucugcaguucuaatt

SEQ ID NO: 2065 - DNA, 21 bp, Artificial Sequence
  source: /note="Description of Artificial Sequence: Synthetic oligonucleotide"
  source: /note="Description of Combined DNA/RNA Molecule: Synthetic oligonucleotide"
guucuaagucaggaaggcatt

SEQ ID NO: 2066 - DNA, 21 bp, Artificial Sequence
  source: /note="Description of Artificial Sequence: Synthetic oligonucleotide"
  source: /note="Description of Combined DNA/RNA Molecule: Synthetic oligonucleotide"
gaaggcaucaauauccuaatt

SEQ ID NO: 2067 - DNA, 21 bp, Artificial Sequence
  source: /note="Description of Artificial Sequence: Synthetic oligonucleotide"
  source: /note="Description of Combined DNA/RNA Molecule: Synthetic oligonucleotide"
ucaauauccuaacccaccutt

SEQ ID NO: 2068 - DNA, 21 bp, Artificial Sequence
  source: /note="Description of Artificial Sequence: Synthetic oligonucleotide"
  source: /note="Description of Combined DNA/RNA Molecule: Synthetic oligonucleotide"
ccaccuccccaaagggagutt

SEQ ID NO: 2069 - DNA, 21 bp, Artificial Sequence
  source: /note="Description of Artificial Sequence: Synthetic oligonucleotide"
  source: /note="Description of Combined DNA/RNA Molecule: Synthetic oligonucleotide"
ccccaaagggagugcagagtt

SEQ ID NO: 2070 - DNA, 21 bp, Artificial Sequence
  source: /note="Description of Artificial Sequence: Synthetic oligonucleotide"
  source: /note="Description of Combined DNA/RNA Molecule: Synthetic oligonucleotide"
gugcagaggcggagcugautt

SEQ ID NO: 2071 - DNA, 21 bp, Artificial Sequence
  source: /note="Description of Artificial Sequence: Synthetic oligonucleotide"
  source: /note="Description of Combined DNA/RNA Molecule: Synthetic oligonucleotide"
ggagcugaugagcguuguctt

SEQ ID NO: 2072 - DNA, 21 bp, Artificial Sequence
  source: /note="Description of Artificial Sequence: Synthetic oligonucleotide"
  source: /note="Description of Combined DNA/RNA Molecule: Synthetic oligonucleotide"
cguugucccaguauucuautt

SEQ ID NO: 2073 - DNA, 21 bp, Artificial Sequence
  source: /note="Description of Artificial Sequence: Synthetic oligonucleotide"
  source: /note="Description of Combined DNA/RNA Molecule: Synthetic oligonucleotide"
ccaguauucuauguuuuuctt

SEQ ID NO: 2074 - DNA, 21 bp, Artificial Sequence
  source: /note="Description of Artificial Sequence: Synthetic oligonucleotide"
  source: /note="Description of Combined DNA/RNA Molecule: Synthetic oligonucleotide"
guuuuucacuaccuggaaatt

SEQ ID NO: 2075 - DNA, 21 bp, Artificial Sequence
  source: /note="Description of Artificial Sequence: Synthetic oligonucleotide"
  source: /note="Description of Combined DNA/RNA Molecule: Synthetic oligonucleotide"
ccuggaaacaggaaaucautt

SEQ ID NO: 2076 - DNA, 21 bp, Artificial Sequence
  source: /note="Description of Artificial Sequence: Synthetic oligonucleotide"
  source: /note="Description of Combined DNA/RNA Molecule: Synthetic oligonucleotide"
ggaacauuuuucauucugatt

SEQ ID NO: 2077 - DNA, 21 bp, Artificial Sequence
  source: /note="Description of Artificial Sequence: Synthetic oligonucleotide"
  source: /note="Description of Combined DNA/RNA Molecule: Synthetic oligonucleotide"
cauucugacccauuaauugtt

SEQ ID NO: 2078 - DNA, 21 bp, Artificial Sequence
  source: /note="Description of Artificial Sequence: Synthetic oligonucleotide"
  source: /note="Description of Combined DNA/RNA Molecule: Synthetic oligonucleotide"
ccauuaauugaaaagcagatt

SEQ ID NO: 2079 - DNA, 21 bp, Artificial Sequence
  source: /note="Description of Artificial Sequence: Synthetic oligonucleotide"
  source: /note="Description of Combined DNA/RNA Molecule: Synthetic oligonucleotide"
aaagcagaaacugaagaaatt

SEQ ID NO: 2080 - DNA, 21 bp, Artificial Sequence
  source: /note="Description of Artificial Sequence: Synthetic oligonucleotide"
  source: /note="Description of Combined DNA/RNA Molecule: Synthetic oligonucleotide"
aacugaagaaaaaauuaaatt

SEQ ID NO: 2081 - DNA, 21 bp, Artificial Sequence
  source: /note="Description of Artificial Sequence: Synthetic oligonucleotide"
  source: /note="Description of Combined DNA/RNA Molecule: Synthetic oligonucleotide"
aaaaaauuaaaagaagggatt

SEQ ID NO: 2082 - DNA, 21 bp, Artificial Sequence
  source: /note="Description of Artificial Sequence: Synthetic oligonucleotide"
  source: /note="Description of Combined DNA/RNA Molecule: Synthetic oligonucleotide"
agggauguugagcauuaugtt

SEQ ID NO: 2083 - DNA, 21 bp, Artificial Sequence
  source: /note="Description of Artificial Sequence: Synthetic oligonucleotide"
  source: /note="Description of Combined DNA/RNA Molecule: Synthetic oligonucleotide"
gagcauuauguccuacagatt

SEQ ID NO: 2084 - DNA, 21 bp, Artificial Sequence
  source: /note="Description of Artificial Sequence: Synthetic oligonucleotide"
  source: /note="Description of Combined DNA/RNA Molecule: Synthetic oligonucleotide"
uguccuacagaaaugcugatt

SEQ ID NO: 2085 - DNA, 21 bp, Artificial Sequence
  source: /note="Description of Artificial Sequence: Synthetic oligonucleotide"
  source: /note="Description of Combined DNA/RNA Molecule: Synthetic oligonucleotide"
aaugcugacuacucuuacatt

SEQ ID NO: 2086 - DNA, 21 bp, Artificial Sequence
  source: /note="Description of Artificial Sequence: Synthetic oligonucleotide"
  source: /note="Description of Combined DNA/RNA Molecule: Synthetic oligonucleotide"
uacucuuacaguguguggatt

SEQ ID NO: 2087 - DNA, 21 bp, Artificial Sequence
  source: /note="Description of Artificial Sequence: Synthetic oligonucleotide"
  source: /note="Description of Combined DNA/RNA Molecule: Synthetic oligonucleotide"
aguguguggaaggguggaatt

SEQ ID NO: 2088 - DNA, 21 bp, Artificial Sequence
  source: /note="Description of Artificial Sequence: Synthetic oligonucleotide"
  source: /note="Description of Combined DNA/RNA Molecule: Synthetic oligonucleotide"
ggguggaagugcuagcacutt

SEQ ID NO: 2089 - DNA, 21 bp, Artificial Sequence
  source: /note="Description of Artificial Sequence: Synthetic oligonucleotide"
  source: /note="Description of Combined DNA/RNA Molecule: Synthetic oligonucleotide"
gcuagcacuugguuaacagtt

SEQ ID NO: 2090 - DNA, 21 bp, Artificial Sequence
  source: /note="Description of Artificial Sequence: Synthetic oligonucleotide"
  source: /note="Description of Combined DNA/RNA Molecule: Synthetic oligonucleotide"
gguuaacagcuuuugcuuutt

SEQ ID NO: 2091 - DNA, 21 bp, Artificial Sequence
  source: /note="Description of Artificial Sequence: Synthetic oligonucleotide"
  source: /note="Description of Combined DNA/RNA Molecule: Synthetic oligonucleotide"
ugcuuuaagaguacuuggatt

SEQ ID NO: 2092 - DNA, 21 bp, Artificial Sequence
  source: /note="Description of Artificial Sequence: Synthetic oligonucleotide"
  source: /note="Description of Combined DNA/RNA Molecule: Synthetic oligonucleotide"
guacuuggacaaguaaauatt

SEQ ID NO: 2093 - DNA, 21 bp, Artificial Sequence
  source: /note="Description of Artificial Sequence: Synthetic oligonucleotide"
  source: /note="Description of Combined DNA/RNA Molecule: Synthetic oligonucleotide"
caaguaaauaaauacguagtt

SEQ ID NO: 2094 - DNA, 21 bp, Artificial Sequence
  source: /note="Description of Artificial Sequence: Synthetic oligonucleotide"
  source: /note="Description of Combined DNA/RNA Molecule: Synthetic oligonucleotide"
auaaauacguagagcagaatt

SEQ ID NO: 2095 - DNA, 21 bp, Artificial Sequence
  source: /note="Description of Artificial Sequence: Synthetic oligonucleotide"
  source: /note="Description of Combined DNA/RNA Molecule: Synthetic oligonucleotide"
gagcagaaccaaaauucaatt

SEQ ID NO: 2096 - DNA, 21 bp, Artificial Sequence
  source: /note="Description of Artificial Sequence: Synthetic oligonucleotide"
  source: /note="Description of Combined DNA/RNA Molecule: Synthetic oligonucleotide"
aauucaauuuguaauucuutt

SEQ ID NO: 2097 - DNA, 21 bp, Artificial Sequence
  source: /note="Description of Artificial Sequence: Synthetic oligonucleotide"
  source: /note="Description of Combined DNA/RNA Molecule: Synthetic oligonucleotide"
guaauucuuuauuguggcutt

SEQ ID NO: 2098 - DNA, 21 bp, Artificial Sequence
  source: /note="Description of Artificial Sequence: Synthetic oligonucleotide"
  source: /note="Description of Combined DNA/RNA Molecule: Synthetic oligonucleotide"
auuguggcuaguugagaautt

SEQ ID NO: 2099 - DNA, 21 bp, Artificial Sequence
  source: /note="Description of Artificial Sequence: Synthetic oligonucleotide"
  source: /note="Description of Combined DNA/RNA Molecule: Synthetic oligonucleotide"
cuaguugagaauuaucaautt

SEQ ID NO: 2100 - DNA, 21 bp, Artificial Sequence
  source: /note="Description of Artificial Sequence: Synthetic oligonucleotide"
  source: /note="Description of Combined DNA/RNA Molecule: Synthetic oligonucleotide"
uuaucaauuagauaauggatt

SEQ ID NO: 2101 - DNA, 21 bp, Artificial Sequence
  source: /note="Description of Artificial Sequence: Synthetic oligonucleotide"
  source: /note="Description of Combined DNA/RNA Molecule: Synthetic oligonucleotide"
aauggaucuuucaaggaaatt

SEQ ID NO: 2102 - DNA, 21 bp, Artificial Sequence
  source: /note="Description of Artificial Sequence: Synthetic oligonucleotide"
  source: /note="Description of Combined DNA/RNA Molecule: Synthetic oligonucleotide"
cuuucaaggaaaauucacatt

SEQ ID NO: 2103 - DNA, 21 bp, Artificial Sequence
  source: /note="Description of Artificial Sequence: Synthetic oligonucleotide"
  source: /note="Description of Combined DNA/RNA Molecule: Synthetic oligonucleotide"
aauucacaguaucaaccaatt

SEQ ID NO: 2104 - DNA, 21 bp, Artificial Sequence
  source: /note="Description of Artificial Sequence: Synthetic oligonucleotide"
  source: /note="Description of Combined DNA/RNA Molecule: Synthetic oligonucleotide"
guaucaaccaauaaaauuatt

SEQ ID NO: 2105 - DNA, 21 bp, Artificial Sequence
  source: /note="Description of Artificial Sequence: Synthetic oligonucleotide"
  source: /note="Description of Combined DNA/RNA Molecule: Synthetic oligonucleotide"
aaaauuacaggguaccuugtt

SEQ ID NO: 2106 - DNA, 21 bp, Artificial Sequence
  source: /note="Description of Artificial Sequence: Synthetic oligonucleotide"
  source: /note="Description of Combined DNA/RNA Molecule: Synthetic oligonucleotide"
aggguaccuugccuguugatt

SEQ ID NO: 2107 - DNA, 21 bp, Artificial Sequence
  source: /note="Description of Artificial Sequence: Synthetic oligonucleotide"
  source: /note="Description of Combined DNA/RNA Molecule: Synthetic oligonucleotide"
guugaagcccgagagaacatt

SEQ ID NO: 2108 - DNA, 21 bp, Artificial Sequence
  source: /note="Description of Artificial Sequence: Synthetic oligonucleotide"
  source: /note="Description of Combined DNA/RNA Molecule: Synthetic oligonucleotide"
ccgagagaacagcuuauautt

SEQ ID NO: 2109 - DNA, 21 bp, Artificial Sequence
  source: /note="Description of Artificial Sequence: Synthetic oligonucleotide"
  source: /note="Description of Combined DNA/RNA Molecule: Synthetic oligonucleotide"
gcuuauaucuuacagccuutt

SEQ ID NO: 2110 - DNA, 21 bp, Artificial Sequence
  source: /note="Description of Artificial Sequence: Synthetic oligonucleotide"
  source: /note="Description of Combined DNA/RNA Molecule: Synthetic oligonucleotide"
cuuacagccuuuacugugatt

SEQ ID NO: 2111 - DNA, 21 bp, Artificial Sequence
  source: /note="Description of Artificial Sequence: Synthetic oligonucleotide"
  source: /note="Description of Combined DNA/RNA Molecule: Synthetic oligonucleotide"
gaauuagaaaggcuuucgatt

SEQ ID NO: 2112 - DNA, 21 bp, Artificial Sequence
  source: /note="Description of Artificial Sequence: Synthetic oligonucleotide"
  source: /note="Description of Combined DNA/RNA Molecule: Synthetic oligonucleotide"
ggcuuucgauauaugcccctt

SEQ ID NO: 2113 - DNA, 21 bp, Artificial Sequence
  source: /note="Description of Artificial Sequence: Synthetic oligonucleotide"
  source: /note="Description of Combined DNA/RNA Molecule: Synthetic oligonucleotide"
gauauaugcccccuggugatt

SEQ ID NO: 2114 - DNA, 21 bp, Artificial Sequence
  source: /note="Description of Artificial Sequence: Synthetic oligonucleotide"
  source: /note="Description of Combined DNA/RNA Molecule: Synthetic oligonucleotide"
ggugaaaaucgacacagcutt

SEQ ID NO: 2115 - DNA, 21 bp, Artificial Sequence
  source: /note="Description of Artificial Sequence: Synthetic oligonucleotide"
  source: /note="Description of Combined DNA/RNA Molecule: Synthetic oligonucleotide"
cgacacagcucuaauuaaatt

SEQ ID NO: 2116 - DNA, 21 bp, Artificial Sequence
  source: /note="Description of Artificial Sequence: Synthetic oligonucleotide"
  source: /note="Description of Combined DNA/RNA Molecule: Synthetic oligonucleotide"
gcucuaauuaaagcugacatt

SEQ ID NO: 2117 - DNA, 21 bp, Artificial Sequence
  source: /note="Description of Artificial Sequence: Synthetic oligonucleotide"
  source: /note="Description of Combined DNA/RNA Molecule: Synthetic oligonucleotide"
cugacaacuuucugcuugatt

SEQ ID NO: 2118 - DNA, 21 bp, Artificial Sequence
  source: /note="Description of Artificial Sequence: Synthetic oligonucleotide"
  source: /note="Description of Combined DNA/RNA Molecule: Synthetic oligonucleotide"
cuuucugcuugaaaauacatt

SEQ ID NO: 2119 - DNA, 21 bp, Artificial Sequence
  source: /note="Description of Artificial Sequence: Synthetic oligonucleotide"
  source: /note="Description of Combined DNA/RNA Molecule: Synthetic oligonucleotide"
aaaauacacugccagcccatt

SEQ ID NO: 2120 - DNA, 21 bp, Artificial Sequence
  source: /note="Description of Artificial Sequence: Synthetic oligonucleotide"
  source: /note="Description of Combined DNA/RNA Molecule: Synthetic oligonucleotide"
agcccagagcaccuuuacatt

SEQ ID NO: 2121 - DNA, 21 bp, Artificial Sequence
  source: /note="Description of Artificial Sequence: Synthetic oligonucleotide"
  source: /note="Description of Combined DNA/RNA Molecule: Synthetic oligonucleotide"
gcaccuuuacauuggccautt

SEQ ID NO: 2122 - DNA, 21 bp, Artificial Sequence
  source: /note="Description of Artificial Sequence: Synthetic oligonucleotide"
  source: /note="Description of Combined DNA/RNA Molecule: Synthetic oligonucleotide"
acauuggccauuucugcgutt

SEQ ID NO: 2123 - DNA, 21 bp, Artificial Sequence
  source: /note="Description of Artificial Sequence: Synthetic oligonucleotide"
  source: /note="Description of Combined DNA/RNA Molecule: Synthetic oligonucleotide"
cugcguaugcucuuucccutt

SEQ ID NO: 2124 - DNA, 21 bp, Artificial Sequence
  source: /note="Description of Artificial Sequence: Synthetic oligonucleotide"
  source: /note="Description of Combined DNA/RNA Molecule: Synthetic oligonucleotide"
cuuucccugggagauaaaatt

SEQ ID NO: 2125 - DNA, 21 bp, Artificial Sequence
  source: /note="Description of Artificial Sequence: Synthetic oligonucleotide"
  source: /note="Description of Combined DNA/RNA Molecule: Synthetic oligonucleotide"
gagauaaaacucacccacatt

SEQ ID NO: 2126 - DNA, 21 bp, Artificial Sequence
  source: /note="Description of Artificial Sequence: Synthetic oligonucleotide"
  source: /note="Description of Combined DNA/RNA Molecule: Synthetic oligonucleotide"
acucacccacaguuucguutt

SEQ ID NO: 2127 - DNA, 21 bp, Artificial Sequence
  source: /note="Description of Artificial Sequence: Synthetic oligonucleotide"
  source: /note="Description of Combined DNA/RNA Molecule: Synthetic oligonucleotide"
caguuucguucaauuguuutt

SEQ ID NO: 2128 - DNA, 21 bp, Artificial Sequence
  source: /note="Description of Artificial Sequence: Synthetic oligonucleotide"
  source: /note="Description of Combined DNA/RNA Molecule: Synthetic oligonucleotide"
caauuguuucagcuuugaatt

SEQ ID NO: 2129 - DNA, 21 bp, Artificial Sequence
  source: /note="Description of Artificial Sequence: Synthetic oligonucleotide"
  source: /note="Description of Combined DNA/RNA Molecule: Synthetic oligonucleotide"
cuuugaagagagaagcuuutt

SEQ ID NO: 2130 - DNA, 21 bp, Artificial Sequence
  source: /note="Description of Artificial Sequence: Synthetic oligonucleotide"
  source: /note="Description of Combined DNA/RNA Molecule: Synthetic oligonucleotide"
gagagaagcuuugguuaaatt

SEQ ID NO: 2131 - DNA, 21 bp, Artificial Sequence
  source: /note="Description of Artificial Sequence: Synthetic oligonucleotide"
  source: /note="Description of Combined DNA/RNA Molecule: Synthetic oligonucleotide"
guuaaagguaauccacccatt

SEQ ID NO: 2132 - DNA, 21 bp, Artificial Sequence
  source: /note="Description of Artificial Sequence: Synthetic oligonucleotide"
  source: /note="Description of Combined DNA/RNA Molecule: Synthetic oligonucleotide"
aauccacccauuuaucguutt

SEQ ID NO: 2133 - DNA, 21 bp, Artificial Sequence
  source: /note="Description of Artificial Sequence: Synthetic oligonucleotide"
  source: /note="Description of Combined DNA/RNA Molecule: Synthetic oligonucleotide"
cauuuaucguuuuuggaaatt

SEQ ID NO: 2134 - DNA, 21 bp, Artificial Sequence
  source: /note="Description of Artificial Sequence: Synthetic oligonucleotide"
  source: /note="Description of Combined DNA/RNA Molecule: Synthetic oligonucleotide"
uuuggaaagacaaucuucatt

SEQ ID NO: 2135 - DNA, 21 bp, Artificial Sequence
  source: /note="Description of Artificial Sequence: Synthetic oligonucleotide"
  source: /note="Description of Combined DNA/RNA Molecule: Synthetic oligonucleotide"
aaucuucagcauaaagacatt

SEQ ID NO: 2136 - DNA, 21 bp, Artificial Sequence
  source: /note="Description of Artificial Sequence: Synthetic oligonucleotide"
  source: /note="Description of Combined DNA/RNA Molecule: Synthetic oligonucleotide"
cucuguaccuaacacuggutt

SEQ ID NO: 2137 - DNA, 21 bp, Artificial Sequence
  source: /note="Description of Artificial Sequence: Synthetic oligonucleotide"
  source: /note="Description of Combined DNA/RNA Molecule: Synthetic oligonucleotide"
acacugguacggcacguautt

SEQ ID NO: 2138 - DNA, 21 bp, Artificial Sequence
  source: /note="Description of Artificial Sequence: Synthetic oligonucleotide"
  source: /note="Description of Combined DNA/RNA Molecule: Synthetic oligonucleotide"
ggcacguaugguagaaacatt

SEQ ID NO: 2139 - DNA, 21 bp, Artificial Sequence
  source: /note="Description of Artificial Sequence: Synthetic oligonucleotide"
  source: /note="Description of Combined DNA/RNA Molecule: Synthetic oligonucleotide"
gguagaaacaacugccuautt

SEQ ID NO: 2140 - DNA, 21 bp, Artificial Sequence
  source: /note="Description of Artificial Sequence: Synthetic oligonucleotide"
  source: /note="Description of Combined DNA/RNA Molecule: Synthetic oligonucleotide"
caacugccuaugcuuuacutt

SEQ ID NO: 2141 - DNA, 21 bp, Artificial Sequence
  source: /note="Description of Artificial Sequence: Synthetic oligonucleotide"
  source: /note="Description of Combined DNA/RNA Molecule: Synthetic oligonucleotide"
cuuuacucaccagucugaatt

SEQ ID NO: 2142 - DNA, 21 bp, Artificial Sequence
  source: /note="Description of Artificial Sequence: Synthetic oligonucleotide"
  source: /note="Description of Combined DNA/RNA Molecule: Synthetic oligonucleotide"
gucugaacuugaaagauautt

SEQ ID NO: 2143 - DNA, 21 bp, Artificial Sequence
  source: /note="Description of Artificial Sequence: Synthetic oligonucleotide"
  source: /note="Description of Combined DNA/RNA Molecule: Synthetic oligonucleotide"
acuugaaagauauaaauuatt

SEQ ID NO: 2144 - DNA, 21 bp, Artificial Sequence
  source: /note="Description of Artificial Sequence: Synthetic oligonucleotide"
  source: /note="Description of Combined DNA/RNA Molecule: Synthetic oligonucleotide"
uauaaauuauguuaacccatt

SEQ ID NO: 2145 - DNA, 21 bp, Artificial Sequence
  source: /note="Description of Artificial Sequence: Synthetic oligonucleotide"
  source: /note="Description of Combined DNA/RNA Molecule: Synthetic oligonucleotide"
guuaacccagucaucaaautt

SEQ ID NO: 2146 - DNA, 21 bp, Artificial Sequence
  source: /note="Description of Artificial Sequence: Synthetic oligonucleotide"
  source: /note="Description of Combined DNA/RNA Molecule: Synthetic oligonucleotide"
ucaucaaauggcuaucagatt

SEQ ID NO: 2147 - DNA, 21 bp, Artificial Sequence
  source: /note="Description of Artificial Sequence: Synthetic oligonucleotide"
  source: /note="Description of Combined DNA/RNA Molecule: Synthetic oligonucleotide"
uaucagaagagcagagguatt

SEQ ID NO: 2148 - DNA, 21 bp, Artificial Sequence
  source: /note="Description of Artificial Sequence: Synthetic oligonucleotide"
  source: /note="Description of Combined DNA/RNA Molecule: Synthetic oligonucleotide"
agagguauggagguggcuutt

SEQ ID NO: 2149 - DNA, 21 bp, Artificial Sequence
  source: /note="Description of Artificial Sequence: Synthetic oligonucleotide"
  source: /note="Description of Combined DNA/RNA Molecule: Synthetic oligonucleotide"
gagguggcuuuuauucaactt

SEQ ID NO: 2150 - DNA, 21 bp, Artificial Sequence
  source: /note="Description of Artificial Sequence: Synthetic oligonucleotide"
  source: /note="Description of Combined DNA/RNA Molecule: Synthetic oligonucleotide"
uauucaacccaggacacaatt

SEQ ID NO: 2151 - DNA, 21 bp, Artificial Sequence
  source: /note="Description of Artificial Sequence: Synthetic oligonucleotide"
  source: /note="Description of Combined DNA/RNA Molecule: Synthetic oligonucleotide"
aggacacaaucaaugccautt

SEQ ID NO: 2152 - DNA, 21 bp, Artificial Sequence
  source: /note="Description of Artificial Sequence: Synthetic oligonucleotide"
  source: /note="Description of Combined DNA/RNA Molecule: Synthetic oligonucleotide"
caaucaaugccauugagggtt

SEQ ID NO: 2153 - DNA, 21 bp, Artificial Sequence
  source: /note="Description of Artificial Sequence: Synthetic oligonucleotide"
  source: /note="Description of Combined DNA/RNA Molecule: Synthetic oligonucleotide"
cauugagggccugacggaatt

SEQ ID NO: 2154 - DNA, 21 bp, Artificial Sequence
  source: /note="Description of Artificial Sequence: Synthetic oligonucleotide"
  source: /note="Description of Combined DNA/RNA Molecule: Synthetic oligonucleotide"
acggaauauucacuccuggtt

SEQ ID NO: 2155 - DNA, 21 bp, Artificial Sequence
  source: /note="Description of Artificial Sequence: Synthetic oligonucleotide"
  source: /note="Description of Combined DNA/RNA Molecule: Synthetic oligonucleotide"
uucacuccugguuaaacaatt

SEQ ID NO: 2156 - DNA, 21 bp, Artificial Sequence
  source: /note="Description of Artificial Sequence: Synthetic oligonucleotide"
  source: /note="Description of Combined DNA/RNA Molecule: Synthetic oligonucleotide"
gguuaaacaacuccgcuugtt

SEQ ID NO: 2157 - DNA, 21 bp, Artificial Sequence
  source: /note="Description of Artificial Sequence: Synthetic oligonucleotide"
  source: /note="Description of Combined DNA/RNA Molecule: Synthetic oligonucleotide"
ccgcuugaguauggacauctt

SEQ ID NO: 2158 - DNA, 21 bp, Artificial Sequence
  source: /note="Description of Artificial Sequence: Synthetic oligonucleotide"
  source: /note="Description of Combined DNA/RNA Molecule: Synthetic oligonucleotide"
ggacaucgauguuucuuactt

SEQ ID NO: 2159 - DNA, 21 bp, Artificial Sequence
  source: /note="Description of Artificial Sequence: Synthetic oligonucleotide"
  source: /note="Description of Combined DNA/RNA Molecule: Synthetic oligonucleotide"
cgauguuucuuacaagcautt

SEQ ID NO: 2160 - DNA, 21 bp, Artificial Sequence
  source: /note="Description of Artificial Sequence: Synthetic oligonucleotide"
  source: /note="Description of Combined DNA/RNA Molecule: Synthetic oligonucleotide"
caagcauaaaggugccuuatt

SEQ ID NO: 2161 - DNA, 21 bp, Artificial Sequence
  source: /note="Description of Artificial Sequence: Synthetic oligonucleotide"
  source: /note="Description of Combined DNA/RNA Molecule: Synthetic oligonucleotide"
gugccuuacauaauuauaatt

SEQ ID NO: 2162 - DNA, 21 bp, Artificial Sequence
  source: /note="Description of Artificial Sequence: Synthetic oligonucleotide"
  source: /note="Description of Combined DNA/RNA Molecule: Synthetic oligonucleotide"
acauaauuauaaaaugacatt

SEQ ID NO: 2163 - DNA, 21 bp, Artificial Sequence
  source: /note="Description of Artificial Sequence: Synthetic oligonucleotide"
  source: /note="Description of Combined DNA/RNA Molecule: Synthetic oligonucleotide"
aaaaugacagacaagaauutt

SEQ ID NO: 2164 - DNA, 21 bp, Artificial Sequence
  source: /note="Description of Artificial Sequence: Synthetic oligonucleotide"
  source: /note="Description of Combined DNA/RNA Molecule: Synthetic oligonucleotide"
caagaauuuccuugggaggtt

SEQ ID NO: 2165 - DNA, 21 bp, Artificial Sequence
  source: /note="Description of Artificial Sequence: Synthetic oligonucleotide"
  source: /note="Description of Combined DNA/RNA Molecule: Synthetic oligonucleotide"
ccuugggaggccaguagagtt

SEQ ID NO: 2166 - DNA, 21 bp, Artificial Sequence
  source: /note="Description of Artificial Sequence: Synthetic oligonucleotide"
  source: /note="Description of Combined DNA/RNA Molecule: Synthetic oligonucleotide"
aguagaggugcuucucaautt

SEQ ID NO: 2167 - DNA, 21 bp, Artificial Sequence
  source: /note="Description of Artificial Sequence: Synthetic oligonucleotide"
  source: /note="Description of Combined DNA/RNA Molecule: Synthetic oligonucleotide"
cuucucaaugaugaccucatt

SEQ ID NO: 2168 - DNA, 21 bp, Artificial Sequence
  source: /note="Description of Artificial Sequence: Synthetic oligonucleotide"
  source: /note="Description of Combined DNA/RNA Molecule: Synthetic oligonucleotide"
ugaccucauugucaguacatt

SEQ ID NO: 2169 - DNA, 21 bp, Artificial Sequence
  source: /note="Description of Artificial Sequence: Synthetic oligonucleotide"
  source: /note="Description of Combined DNA/RNA Molecule: Synthetic oligonucleotide"
gucaguacaggauuuggcatt

SEQ ID NO: 2170 - DNA, 21 bp, Artificial Sequence
  source: /note="Description of Artificial Sequence: Synthetic oligonucleotide"
  source: /note="Description of Combined DNA/RNA Molecule: Synthetic oligonucleotide"
aggauuuggcaguggcuugtt

SEQ ID NO: 2171 - DNA, 21 bp, Artificial Sequence
  source: /note="Description of Artificial Sequence: Synthetic oligonucleotide"
  source: /note="Description of Combined DNA/RNA Molecule: Synthetic oligonucleotide"
uggcuuggcuacaguacautt

SEQ ID NO: 2172 - DNA, 21 bp, Artificial Sequence
  source: /note="Description of Artificial Sequence: Synthetic oligonucleotide"
  source: /note="Description of Combined DNA/RNA Molecule: Synthetic oligonucleotide"
gcuacaguacauguaacaatt

SEQ ID NO: 2173 - DNA, 21 bp, Artificial Sequence
  source: /note="Description of Artificial Sequence: Synthetic oligonucleotide"
  source: /note="Description of Combined DNA/RNA Molecule: Synthetic oligonucleotide"
aacaacuguaguucacaaatt

SEQ ID NO: 2174 - DNA, 21 bp, Artificial Sequence
  source: /note="Description of Artificial Sequence: Synthetic oligonucleotide"
  source: /note="Description of Combined DNA/RNA Molecule: Synthetic oligonucleotide"
guaguucacaaaaccaguatt

SEQ ID NO: 2175 - DNA, 21 bp, Artificial Sequence
  source: /note="Description of Artificial Sequence: Synthetic oligonucleotide"
  source: /note="Description of Combined DNA/RNA Molecule: Synthetic oligonucleotide"
aaaccaguaccucugaggatt

SEQ ID NO: 2176 - DNA, 21 bp, Artificial Sequence
  source: /note="Description of Artificial Sequence: Synthetic oligonucleotide"
  source: /note="Description of Combined DNA/RNA Molecule: Synthetic oligonucleotide"
ugaggaaguuugcagcuuutt

SEQ ID NO: 2177 - DNA, 21 bp, Artificial Sequence
  source: /note="Description of Artificial Sequence: Synthetic oligonucleotide"
  source: /note="Description of Combined DNA/RNA Molecule: Synthetic oligonucleotide"
ugcagcuuuuauuugaaaatt

SEQ ID NO: 2178 - DNA, 21 bp, Artificial Sequence
  source: /note="Description of Artificial Sequence: Synthetic oligonucleotide"
  source: /note="Description of Combined DNA/RNA Molecule: Synthetic oligonucleotide"
auuugaaaaucgauacucatt

SEQ ID NO: 2179 - DNA, 21 bp, Artificial Sequence
  source: /note="Description of Artificial Sequence: Synthetic oligonucleotide"
  source: /note="Description of Combined DNA/RNA Molecule: Synthetic oligonucleotide"
cgauacucaggauauugaatt

SEQ ID NO: 2180 - DNA, 21 bp, Artificial Sequence
  source: /note="Description of Artificial Sequence: Synthetic oligonucleotide"
  source: /note="Description of Combined DNA/RNA Molecule: Synthetic oligonucleotide"
ggauauugaagcaucccactt

SEQ ID NO: 2181 - DNA, 21 bp, Artificial Sequence
  source: /note="Description of Artificial Sequence: Synthetic oligonucleotide"
  source: /note="Description of Combined DNA/RNA Molecule: Synthetic oligonucleotide"
gaagcaucccacuacagagtt

SEQ ID NO: 2182 - DNA, 21 bp, Artificial Sequence
  source: /note="Description of Artificial Sequence: Synthetic oligonucleotide"
  source: /note="Description of Combined DNA/RNA Molecule: Synthetic oligonucleotide"
acuacagaggcuacggaaatt

SEQ ID NO: 2183 - DNA, 21 bp, Artificial Sequence
  source: /note="Description of Artificial Sequence: Synthetic oligonucleotide"
  source: /note="Description of Combined DNA/RNA Molecule: Synthetic oligonucleotide"
cggaaacucugauuacaaatt

SEQ ID NO: 2184 - DNA, 21 bp, Artificial Sequence
  source: /note="Description of Artificial Sequence: Synthetic oligonucleotide"
  source: /note="Description of Combined DNA/RNA Molecule: Synthetic oligonucleotide"
ugauuacaaacgcauaguatt

SEQ ID NO: 2185 - DNA, 21 bp, Artificial Sequence
  source: /note="Description of Artificial Sequence: Synthetic oligonucleotide"
  source: /note="Description of Combined DNA/RNA Molecule: Synthetic oligonucleotide"
gcauaguagcaugugccagtt

SEQ ID NO: 2186 - DNA, 21 bp, Artificial Sequence
  source: /note="Description of Artificial Sequence: Synthetic oligonucleotide"
  source: /note="Description of Combined DNA/RNA Molecule: Synthetic oligonucleotide"
gcaugugccagcuacaagctt

SEQ ID NO: 2187 - DNA, 21 bp, Artificial Sequence
  source: /note="Description of Artificial Sequence: Synthetic oligonucleotide"
  source: /note="Description of Combined DNA/RNA Molecule: Synthetic oligonucleotide"
cuacaagcccagcagggaatt

SEQ ID NO: 2188 - DNA, 21 bp, Artificial Sequence
  source: /note="Description of Artificial Sequence: Synthetic oligonucleotide"
  source: /note="Description of Combined DNA/RNA Molecule: Synthetic oligonucleotide"
cagcagggaagaaucaucatt

SEQ ID NO: 2189 - DNA, 21 bp, Artificial Sequence
  source: /note="Description of Artificial Sequence: Synthetic oligonucleotide"
  source: /note="Description of Combined DNA/RNA Molecule: Synthetic oligonucleotide"
gaaucaucaucuggauccutt

SEQ ID NO: 2190 - DNA, 21 bp, Artificial Sequence
  source: /note="Description of Artificial Sequence: Synthetic oligonucleotide"
  source: /note="Description of Combined DNA/RNA Molecule: Synthetic oligonucleotide"
gauccucucaugcggugautt

SEQ ID NO: 2191 - DNA, 21 bp, Artificial Sequence
  source: /note="Description of Artificial Sequence: Synthetic oligonucleotide"
  source: /note="Description of Combined DNA/RNA Molecule: Synthetic oligonucleotide"
cucaugcggugauggacautt

SEQ ID NO: 2192 - DNA, 21 bp, Artificial Sequence
  source: /note="Description of Artificial Sequence: Synthetic oligonucleotide"
  source: /note="Description of Combined DNA/RNA Molecule: Synthetic oligonucleotide"
gauggacaucuccuugccutt

SEQ ID NO: 2193 - DNA, 21 bp, Artificial Sequence
  source: /note="Description of Artificial Sequence: Synthetic oligonucleotide"
  source: /note="Description of Combined DNA/RNA Molecule: Synthetic oligonucleotide"
cuugccuacuggaaucagutt

SEQ ID NO: 2194 - DNA, 21 bp, Artificial Sequence
  source: /note="Description of Artificial Sequence: Synthetic oligonucleotide"
  source: /note="Description of Combined DNA/RNA Molecule: Synthetic oligonucleotide"
gaaucagugcaaaugaagatt

SEQ ID NO: 2195 - DNA, 21 bp, Artificial Sequence
  source: /note="Description of Artificial Sequence: Synthetic oligonucleotide"
  source: /note="Description of Combined DNA/RNA Molecule: Synthetic oligonucleotide"
aaaugaagaagacuuaaaatt

SEQ ID NO: 2196 - DNA, 21 bp, Artificial Sequence
  source: /note="Description of Artificial Sequence: Synthetic oligonucleotide"
  source: /note="Description of Combined DNA/RNA Molecule: Synthetic oligonucleotide"
gaagacuuaaaagcccuugtt

SEQ ID NO: 2197 - DNA, 21 bp, Artificial Sequence
  source: /note="Description of Artificial Sequence: Synthetic oligonucleotide"
  source: /note="Description of Combined DNA/RNA Molecule: Synthetic oligonucleotide"
ccuuguggaagggguggautt

SEQ ID NO: 2198 - DNA, 21 bp, Artificial Sequence
  source: /note="Description of Artificial Sequence: Synthetic oligonucleotide"
  source: /note="Description of Combined DNA/RNA Molecule: Synthetic oligonucleotide"
gaagggguggaucaacuautt

SEQ ID NO: 2199 - DNA, 21 bp, Artificial Sequence
  source: /note="Description of Artificial Sequence: Synthetic oligonucleotide"
  source: /note="Description of Combined DNA/RNA Molecule: Synthetic oligonucleotide"
aucaacuauucacugauuatt

SEQ ID NO: 2200 - DNA, 21 bp, Artificial Sequence
  source: /note="Description of Artificial Sequence: Synthetic oligonucleotide"
  source: /note="Description of Combined DNA/RNA Molecule: Synthetic oligonucleotide"
cacugauuaccaaaucaaatt

SEQ ID NO: 2201 - DNA, 21 bp, Artificial Sequence
  source: /note="Description of Artificial Sequence: Synthetic oligonucleotide"
  source: /note="Description of Combined DNA/RNA Molecule: Synthetic oligonucleotide"
aucaaagauggacauguuatt

SEQ ID NO: 2202 - DNA, 21 bp, Artificial Sequence
  source: /note="Description of Artificial Sequence: Synthetic oligonucleotide"
  source: /note="Description of Combined DNA/RNA Molecule: Synthetic oligonucleotide"
ggacauguuauucugcaactt

SEQ ID NO: 2203 - DNA, 21 bp, Artificial Sequence
  source: /note="Description of Artificial Sequence: Synthetic oligonucleotide"
  source: /note="Description of Combined DNA/RNA Molecule: Synthetic oligonucleotide"
ucugcaacugaauucgauutt

SEQ ID NO: 2204 - DNA, 21 bp, Artificial Sequence
  source: /note="Description of Artificial Sequence: Synthetic oligonucleotide"
  source: /note="Description of Combined DNA/RNA Molecule: Synthetic oligonucleotide"
gaauucgauucccuccagutt

SEQ ID NO: 2205 - DNA, 21 bp, Artificial Sequence
  source: /note="Description of Artificial Sequence: Synthetic oligonucleotide"
  source: /note="Description of Combined DNA/RNA Molecule: Synthetic oligonucleotide"
cccuccagugauuuccuuutt

SEQ ID NO: 2206 - DNA, 21 bp, Artificial Sequence
  source: /note="Description of Artificial Sequence: Synthetic oligonucleotide"
  source: /note="Description of Combined DNA/RNA Molecule: Synthetic oligonucleotide"
gauuuccuuuguguacgautt

SEQ ID NO: 2207 - DNA, 21 bp, Artificial Sequence
  source: /note="Description of Artificial Sequence: Synthetic oligonucleotide"
  source: /note="Description of Combined DNA/RNA Molecule: Synthetic oligonucleotide"
guacgauuccggauauuugtt

SEQ ID NO: 2208 - DNA, 21 bp, Artificial Sequence
  source: /note="Description of Artificial Sequence: Synthetic oligonucleotide"
  source: /note="Description of Combined DNA/RNA Molecule: Synthetic oligonucleotide"
cggauauuugaacucuuugtt

SEQ ID NO: 2209 - DNA, 21 bp, Artificial Sequence
  source: /note="Description of Artificial Sequence: Synthetic oligonucleotide"
  source: /note="Description of Combined DNA/RNA Molecule: Synthetic oligonucleotide"
acucuuugaaguuggguuutt

SEQ ID NO: 2210 - DNA, 21 bp, Artificial Sequence
  source: /note="Description of Artificial Sequence: Synthetic oligonucleotide"
  source: /note="Description of Combined DNA/RNA Molecule: Synthetic oligonucleotide"
aguuggguuucucaguccutt

SEQ ID NO: 2211 - DNA, 21 bp, Artificial Sequence
  source: /note="Description of Artificial Sequence: Synthetic oligonucleotide"
  source: /note="Description of Combined DNA/RNA Molecule: Synthetic oligonucleotide"
uucucaguccugccacuuutt

SEQ ID NO: 2212 - DNA, 21 bp, Artificial Sequence
  source: /note="Description of Artificial Sequence: Synthetic oligonucleotide"
  source: /note="Description of Combined DNA/RNA Molecule: Synthetic oligonucleotide"
cacuuucacaguguacgaatt

SEQ ID NO: 2213 - DNA, 21 bp, Artificial Sequence
  source: /note="Description of Artificial Sequence: Synthetic oligonucleotide"
  source: /note="Description of Combined DNA/RNA Molecule: Synthetic oligonucleotide"
cacaguguacgaauaccactt

SEQ ID NO: 2214 - DNA, 21 bp, Artificial Sequence
  source: /note="Description of Artificial Sequence: Synthetic oligonucleotide"
  source: /note="Description of Combined DNA/RNA Molecule: Synthetic oligonucleotide"
accacagaccagauaaacatt

SEQ ID NO: 2215 - DNA, 21 bp, Artificial Sequence
  source: /note="Description of Artificial Sequence: Synthetic oligonucleotide"
  source: /note="Description of Combined DNA/RNA Molecule: Synthetic oligonucleotide"
ccagauaaacaguguaccatt

SEQ ID NO: 2216 - DNA, 21 bp, Artificial Sequence
  source: /note="Description of Artificial Sequence: Synthetic oligonucleotide"
  source: /note="Description of Combined DNA/RNA Molecule: Synthetic oligonucleotide"
caguguaccauguuuuauatt

SEQ ID NO: 2217 - DNA, 21 bp, Artificial Sequence
  source: /note="Description of Artificial Sequence: Synthetic oligonucleotide"
  source: /note="Description of Combined DNA/RNA Molecule: Synthetic oligonucleotide"
guuuuauagcacuuccaautt

SEQ ID NO: 2218 - DNA, 21 bp, Artificial Sequence
  source: /note="Description of Artificial Sequence: Synthetic oligonucleotide"
  source: /note="Description of Combined DNA/RNA Molecule: Synthetic oligonucleotide"
cuuccaauaucaaaauucatt

SEQ ID NO: 2219 - DNA, 21 bp, Artificial Sequence
  source: /note="Description of Artificial Sequence: Synthetic oligonucleotide"
  source: /note="Description of Combined DNA/RNA Molecule: Synthetic oligonucleotide"
aucaaaauucagaaagucutt

SEQ ID NO: 2220 - DNA, 21 bp, Artificial Sequence
  source: /note="Description of Artificial Sequence: Synthetic oligonucleotide"
  source: /note="Description of Combined DNA/RNA Molecule: Synthetic oligonucleotide"
gaaagucugugaaggagcctt

SEQ ID NO: 2221 - DNA, 21 bp, Artificial Sequence
  source: /note="Description of Artificial Sequence: Synthetic oligonucleotide"
  source: /note="Description of Combined DNA/RNA Molecule: Synthetic oligonucleotide"
gaaggagccgcgugcaagutt

SEQ ID NO: 2222 - DNA, 21 bp, Artificial Sequence
  source: /note="Description of Artificial Sequence: Synthetic oligonucleotide"
  source: /note="Description of Combined DNA/RNA Molecule: Synthetic oligonucleotide"
cgugcaaguguguagaagctt

SEQ ID NO: 2223 - DNA, 21 bp, Artificial Sequence
  source: /note="Description of Artificial Sequence: Synthetic oligonucleotide"
  source: /note="Description of Combined DNA/RNA Molecule: Synthetic oligonucleotide"
guagaagcugauugugggctt

SEQ ID NO: 2224 - DNA, 21 bp, Artificial Sequence
  source: /note="Description of Artificial Sequence: Synthetic oligonucleotide"
  source: /note="Description of Combined DNA/RNA Molecule: Synthetic oligonucleotide"
cugauugugggcaaaugcatt

SEQ ID NO: 2225 - DNA, 21 bp, Artificial Sequence
  source: /note="Description of Artificial Sequence: Synthetic oligonucleotide"
  source: /note="Description of Combined DNA/RNA Molecule: Synthetic oligonucleotide"
gcaaaugcaggaagaauugtt

SEQ ID NO: 2226 - DNA, 21 bp, Artificial Sequence
  source: /note="Description of Artificial Sequence: Synthetic oligonucleotide"
  source: /note="Description of Combined DNA/RNA Molecule: Synthetic oligonucleotide"
gaagaauuggaucugacaatt

SEQ ID NO: 2227 - DNA, 21 bp, Artificial Sequence
  source: /note="Description of Artificial Sequence: Synthetic oligonucleotide"
  source: /note="Description of Combined DNA/RNA Molecule: Synthetic oligonucleotide"
cugacaaucucugcagagatt

SEQ ID NO: 2228 - DNA, 21 bp, Artificial Sequence
  source: /note="Description of Artificial Sequence: Synthetic oligonucleotide"
  source: /note="Description of Combined DNA/RNA Molecule: Synthetic oligonucleotide"
gcagagacaagaaaacaaatt

SEQ ID NO: 2229 - DNA, 21 bp, Artificial Sequence
  source: /note="Description of Artificial Sequence: Synthetic oligonucleotide"
  source: /note="Description of Combined DNA/RNA Molecule: Synthetic oligonucleotide"
caagaaaacaaacagcaugtt

SEQ ID NO: 2230 - DNA, 21 bp, Artificial Sequence
  source: /note="Description of Artificial Sequence: Synthetic oligonucleotide"
  source: /note="Description of Combined DNA/RNA Molecule: Synthetic oligonucleotide"
acagcauguaaaccagagatt

SEQ ID NO: 2231 - DNA, 21 bp, Artificial Sequence
  source: /note="Description of Artificial Sequence: Synthetic oligonucleotide"
  source: /note="Description of Combined DNA/RNA Molecule: Synthetic oligonucleotide"
ccagagauugcauaugcuutt

SEQ ID NO: 2232 - DNA, 21 bp, Artificial Sequence
  source: /note="Description of Artificial Sequence: Synthetic oligonucleotide"
  source: /note="Description of Combined DNA/RNA Molecule: Synthetic oligonucleotide"
gcauaugcuuauaaaguuatt

SEQ ID NO: 2233 - DNA, 21 bp, Artificial Sequence
  source: /note="Description of Artificial Sequence: Synthetic oligonucleotide"
  source: /note="Description of Combined DNA/RNA Molecule: Synthetic oligonucleotide"
uuauaaaguuagcaucacatt

SEQ ID NO: 2234 - DNA, 21 bp, Artificial Sequence
  source: /note="Description of Artificial Sequence: Synthetic oligonucleotide"
  source: /note="Description of Combined DNA/RNA Molecule: Synthetic oligonucleotide"
caucacauccaucacuguatt

SEQ ID NO: 2235 - DNA, 21 bp, Artificial Sequence
  source: /note="Description of Artificial Sequence: Synthetic oligonucleotide"
  source: /note="Description of Combined DNA/RNA Molecule: Synthetic oligonucleotide"
ucacuguagaaaauguuuutt

SEQ ID NO: 2236 - DNA, 21 bp, Artificial Sequence
  source: /note="Description of Artificial Sequence: Synthetic oligonucleotide"
  source: /note="Description of Combined DNA/RNA Molecule: Synthetic oligonucleotide"
agaaaauguuuuugucaagtt

SEQ ID NO: 2237 - DNA, 21 bp, Artificial Sequence
  source: /note="Description of Artificial Sequence: Synthetic oligonucleotide"
  source: /note="Description of Combined DNA/RNA Molecule: Synthetic oligonucleotide"
uuugucaaguacaaggcaatt

SEQ ID NO: 2238 - DNA, 21 bp, Artificial Sequence
  source: /note="Description of Artificial Sequence: Synthetic oligonucleotide"
  source: /note="Description of Combined DNA/RNA Molecule: Synthetic oligonucleotide"
aggcaacccuucuggauautt

SEQ ID NO: 2239 - DNA, 21 bp, Artificial Sequence
  source: /note="Description of Artificial Sequence: Synthetic oligonucleotide"
  source: /note="Description of Combined DNA/RNA Molecule: Synthetic oligonucleotide"
ccuucuggauaucuacaaatt

SEQ ID NO: 2240 - DNA, 21 bp, Artificial Sequence
  source: /note="Description of Artificial Sequence: Synthetic oligonucleotide"
  source: /note="Description of Combined DNA/RNA Molecule: Synthetic oligonucleotide"
uaucuacaaaacuggggaatt

SEQ ID NO: 2241 - DNA, 21 bp, Artificial Sequence
  source: /note="Description of Artificial Sequence: Synthetic oligonucleotide"
  source: /note="Description of Combined DNA/RNA Molecule: Synthetic oligonucleotide"
cuggggaagcuguugcugatt

SEQ ID NO: 2242 - DNA, 21 bp, Artificial Sequence
  source: /note="Description of Artificial Sequence: Synthetic oligonucleotide"
  source: /note="Description of Combined DNA/RNA Molecule: Synthetic oligonucleotide"
cuguugcugagaaagacuctt

SEQ ID NO: 2243 - DNA, 21 bp, Artificial Sequence
  source: /note="Description of Artificial Sequence: Synthetic oligonucleotide"
  source: /note="Description of Combined DNA/RNA Molecule: Synthetic oligonucleotide"
gacucugagauuaccuucatt

SEQ ID NO: 2244 - DNA, 21 bp, Artificial Sequence
  source: /note="Description of Artificial Sequence: Synthetic oligonucleotide"
  source: /note="Description of Combined DNA/RNA Molecule: Synthetic oligonucleotide"
gagauuaccuucauuaaaatt

SEQ ID NO: 2245 - DNA, 21 bp, Artificial Sequence
  source: /note="Description of Artificial Sequence: Synthetic oligonucleotide"
  source: /note="Description of Combined DNA/RNA Molecule: Synthetic oligonucleotide"
auuaaaaagguaaccuguatt

SEQ ID NO: 2246 - DNA, 21 bp, Artificial Sequence
  source: /note="Description of Artificial Sequence: Synthetic oligonucleotide"
  source: /note="Description of Combined DNA/RNA Molecule: Synthetic oligonucleotide"
uaaccuguacuaacgcugatt

SEQ ID NO: 2247 - DNA, 21 bp, Artificial Sequence
  source: /note="Description of Artificial Sequence: Synthetic oligonucleotide"
  source: /note="Description of Combined DNA/RNA Molecule: Synthetic oligonucleotide"
cuaacgcugagcugguaaatt

SEQ ID NO: 2248 - DNA, 21 bp, Artificial Sequence
  source: /note="Description of Artificial Sequence: Synthetic oligonucleotide"
  source: /note="Description of Combined DNA/RNA Molecule: Synthetic oligonucleotide"
gguaaaaggaagacaguactt

SEQ ID NO: 2249 - DNA, 21 bp, Artificial Sequence
  source: /note="Description of Artificial Sequence: Synthetic oligonucleotide"
  source: /note="Description of Combined DNA/RNA Molecule: Synthetic oligonucleotide"
gaagacaguacuuaauuautt

SEQ ID NO: 2250 - DNA, 21 bp, Artificial Sequence
  source: /note="Description of Artificial Sequence: Synthetic oligonucleotide"
  source: /note="Description of Combined DNA/RNA Molecule: Synthetic oligonucleotide"
cuuaauuauggguaaagaatt

SEQ ID NO: 2251 - DNA, 21 bp, Artificial Sequence
  source: /note="Description of Artificial Sequence: Synthetic oligonucleotide"
  source: /note="Description of Combined DNA/RNA Molecule: Synthetic oligonucleotide"
uaaagaagcccuccagauatt

SEQ ID NO: 2252 - DNA, 21 bp, Artificial Sequence
  source: /note="Description of Artificial Sequence: Synthetic oligonucleotide"
  source: /note="Description of Combined DNA/RNA Molecule: Synthetic oligonucleotide"
ccuccagauaaaauacaautt

SEQ ID NO: 2253 - DNA, 21 bp, Artificial Sequence
  source: /note="Description of Artificial Sequence: Synthetic oligonucleotide"
  source: /note="Description of Combined DNA/RNA Molecule: Synthetic oligonucleotide"
aaauacaauuucaguuucatt

SEQ ID NO: 2254 - DNA, 21 bp, Artificial Sequence
  source: /note="Description of Artificial Sequence: Synthetic oligonucleotide"
  source: /note="Description of Combined DNA/RNA Molecule: Synthetic oligonucleotide"
caguuucagguacaucuactt

SEQ ID NO: 2255 - DNA, 21 bp, Artificial Sequence
  source: /note="Description of Artificial Sequence: Synthetic oligonucleotide"
  source: /note="Description of Combined DNA/RNA Molecule: Synthetic oligonucleotide"
gguacaucuacccuuuagatt

SEQ ID NO: 2256 - DNA, 21 bp, Artificial Sequence
  source: /note="Description of Artificial Sequence: Synthetic oligonucleotide"
  source: /note="Description of Combined DNA/RNA Molecule: Synthetic oligonucleotide"
ccuuuagauuccuugaccutt

SEQ ID NO: 2257 - DNA, 21 bp, Artificial Sequence
  source: /note="Description of Artificial Sequence: Synthetic oligonucleotide"
  source: /note="Description of Combined DNA/RNA Molecule: Synthetic oligonucleotide"
ccuugaccuggauugaauatt

SEQ ID NO: 2258 - DNA, 21 bp, Artificial Sequence
  source: /note="Description of Artificial Sequence: Synthetic oligonucleotide"
  source: /note="Description of Combined DNA/RNA Molecule: Synthetic oligonucleotide"
ggauugaauacuggccuagtt

SEQ ID NO: 2259 - DNA, 21 bp, Artificial Sequence
  source: /note="Description of Artificial Sequence: Synthetic oligonucleotide"
  source: /note="Description of Combined DNA/RNA Molecule: Synthetic oligonucleotide"
cuggccuagagacacaacatt

SEQ ID NO: 2260 - DNA, 21 bp, Artificial Sequence
  source: /note="Description of Artificial Sequence: Synthetic oligonucleotide"
  source: /note="Description of Combined DNA/RNA Molecule: Synthetic oligonucleotide"
gagacacaacauguucauctt

SEQ ID NO: 2261 - DNA, 21 bp, Artificial Sequence
  source: /note="Description of Artificial Sequence: Synthetic oligonucleotide"
  source: /note="Description of Combined DNA/RNA Molecule: Synthetic oligonucleotide"
guucaucgugucaagcauutt

SEQ ID NO: 2262 - DNA, 21 bp, Artificial Sequence
  source: /note="Description of Artificial Sequence: Synthetic oligonucleotide"
  source: /note="Description of Combined DNA/RNA Molecule: Synthetic oligonucleotide"
gucaagcauuuuuagcuaatt

SEQ ID NO: 2263 - DNA, 21 bp, Artificial Sequence
  source: /note="Description of Artificial Sequence: Synthetic oligonucleotide"
  source: /note="Description of Combined DNA/RNA Molecule: Synthetic oligonucleotide"
agcuaauuuagaugaauuutt

SEQ ID NO: 2264 - DNA, 21 bp, Artificial Sequence
  source: /note="Description of Artificial Sequence: Synthetic oligonucleotide"
  source: /note="Description of Combined DNA/RNA Molecule: Synthetic oligonucleotide"
agaugaauuugccgaagautt

SEQ ID NO: 2265 - DNA, 21 bp, Artificial Sequence
  source: /note="Description of Artificial Sequence: Synthetic oligonucleotide"
  source: /note="Description of Combined DNA/RNA Molecule: Synthetic oligonucleotide"
ccgaagauaucuuuuuaaatt

SEQ ID NO: 2266 - DNA, 21 bp, Artificial Sequence
  source: /note="Description of Artificial Sequence: Synthetic oligonucleotide"
  source: /note="Description of Combined DNA/RNA Molecule: Synthetic oligonucleotide"
cuuuuuaaauggaugcuaatt

SEQ ID NO: 2267 - DNA, 21 bp, Artificial Sequence
  source: /note="Description of Artificial Sequence: Synthetic oligonucleotide"
  source: /note="Description of Combined DNA/RNA Molecule: Synthetic oligonucleotide"
ggaugcuaaaauuccugaatt

SEQ ID NO: 2268 - DNA, 21 bp, Artificial Sequence
  source: /note="Description of Artificial Sequence: Synthetic oligonucleotide"
  source: /note="Description of Combined DNA/RNA Molecule: Synthetic oligonucleotide"
uaaaauuccugaaguucagtt

SEQ ID NO: 2269 - DNA, 21 bp, Artificial Sequence
  source: /note="Description of Artificial Sequence: Synthetic oligonucleotide"
  source: /note="Description of Combined DNA/RNA Molecule: Synthetic oligonucleotide"
aguucagcugcauacaguutt

SEQ ID NO: 2270 - DNA, 21 bp, Artificial Sequence
  source: /note="Description of Artificial Sequence: Synthetic oligonucleotide"
  source: /note="Description of Combined DNA/RNA Molecule: Synthetic oligonucleotide"
gcauacaguuugcacuuautt

SEQ ID NO: 2271 - DNA, 21 bp, Artificial Sequence
  source: /note="Description of Artificial Sequence: Synthetic oligonucleotide"
  source: /note="Description of Combined DNA/RNA Molecule: Synthetic oligonucleotide"
acuuauggacuccuguugutt

SEQ ID NO: 2272 - DNA, 21 bp, Artificial Sequence
  source: /note="Description of Artificial Sequence: Synthetic oligonucleotide"
  source: /note="Description of Combined DNA/RNA Molecule: Synthetic oligonucleotide"
ggacuccuguuguugaagutt

SEQ ID NO: 2273 - DNA, 21 bp, Artificial Sequence
  source: /note="Description of Artificial Sequence: Synthetic oligonucleotide"
  source: /note="Description of Combined DNA/RNA Molecule: Synthetic oligonucleotide"
uguugaaguucguuuuuuutt

SEQ ID NO: 2274 - DNA, 21 bp, Artificial Sequence
  source: /note="Description of Artificial Sequence: Synthetic oligonucleotide"
  source: /note="Description of Combined DNA/RNA Molecule: Synthetic oligonucleotide"
uuuuuuguuuucuucuuuutt

SEQ ID NO: 2275 - DNA, 21 bp, Artificial Sequence
  source: /note="Description of Artificial Sequence: Synthetic oligonucleotide"
  source: /note="Description of Combined DNA/RNA Molecule: Synthetic oligonucleotide"
ucuucuuuuuuuaaacauutt

SEQ ID NO: 2276 - DNA, 21 bp, Artificial Sequence
  source: /note="Description of Artificial Sequence: Synthetic oligonucleotide"
  source: /note="Description of Combined DNA/RNA Molecule: Synthetic oligonucleotide"
uuuuuaaacauucauagcutt

SEQ ID NO: 2277 - DNA, 21 bp, Artificial Sequence
  source: /note="Description of Artificial Sequence: Synthetic oligonucleotide"
  source: /note="Description of Combined DNA/RNA Molecule: Synthetic oligonucleotide"
auagcuggucuuauuuguatt

SEQ ID NO: 2278 - DNA, 21 bp, Artificial Sequence
  source: /note="Description of Artificial Sequence: Synthetic oligonucleotide"
  source: /note="Description of Combined DNA/RNA Molecule: Synthetic oligonucleotide"
gucuuauuuguaaagcucatt

SEQ ID NO: 2279 - DNA, 21 bp, Artificial Sequence
  source: /note="Description of Artificial Sequence: Synthetic oligonucleotide"
  source: /note="Description of Combined DNA/RNA Molecule: Synthetic oligonucleotide"
aaagcucacuuuacuuagatt

SEQ ID NO: 2280 - DNA, 21 bp, Artificial Sequence
  source: /note="Description of Artificial Sequence: Synthetic oligonucleotide"
  source: /note="Description of Combined DNA/RNA Molecule: Synthetic oligonucleotide"
acuuagaauuaguggcacutt

SEQ ID NO: 2281 - DNA, 21 bp, Artificial Sequence
  source: /note="Description of Artificial Sequence: Synthetic oligonucleotide"
  source: /note="Description of Combined DNA/RNA Molecule: Synthetic oligonucleotide"
aguggcacuugcuuuuauutt

SEQ ID NO: 2282 - DNA, 21 bp, Artificial Sequence
  source: /note="Description of Artificial Sequence: Synthetic oligonucleotide"
  source: /note="Description of Combined DNA/RNA Molecule: Synthetic oligonucleotide"
gcuuuuauuagagaaugautt

SEQ ID NO: 2283 - DNA, 21 bp, Artificial Sequence
  source: /note="Description of Artificial Sequence: Synthetic oligonucleotide"
  source: /note="Description of Combined DNA/RNA Molecule: Synthetic oligonucleotide"
gagaaugauuucaaaugcutt

SEQ ID NO: 2284 - DNA, 21 bp, Artificial Sequence
  source: /note="Description of Artificial Sequence: Synthetic oligonucleotide"
  source: /note="Description of Combined DNA/RNA Molecule: Synthetic oligonucleotide"
uuucaaaugcuguaacuuutt

SEQ ID NO: 2285 - DNA, 21 bp, Artificial Sequence
  source: /note="Description of Artificial Sequence: Synthetic oligonucleotide"
  source: /note="Description of Combined DNA/RNA Molecule: Synthetic oligonucleotide"
guaacuuucugaaauaacatt

SEQ ID NO: 2286 - DNA, 21 bp, Artificial Sequence
  source: /note="Description of Artificial Sequence: Synthetic oligonucleotide"
  source: /note="Description of Combined DNA/RNA Molecule: Synthetic oligonucleotide"
gaaauaacauggccuuggatt

SEQ ID NO: 2287 - DNA, 21 bp, Artificial Sequence
  source: /note="Description of Artificial Sequence: Synthetic oligonucleotide"
  source: /note="Description of Combined DNA/RNA Molecule: Synthetic oligonucleotide"
ccuuggagggcaugaagactt

SEQ ID NO: 2288 - DNA, 21 bp, Artificial Sequence
  source: /note="Description of Artificial Sequence: Synthetic oligonucleotide"
  source: /note="Description of Combined DNA/RNA Molecule: Synthetic oligonucleotide"
agggcaugaagacagauactt

SEQ ID NO: 2289 - DNA, 21 bp, Artificial Sequence
  source: /note="Description of Artificial Sequence: Synthetic oligonucleotide"
  source: /note="Description of Combined DNA/RNA Molecule: Synthetic oligonucleotide"
gauacuccuccaagguuautt

SEQ ID NO: 2290 - DNA, 21 bp, Artificial Sequence
  source: /note="Description of Artificial Sequence: Synthetic oligonucleotide"
  source: /note="Description of Combined DNA/RNA Molecule: Synthetic oligonucleotide"
ccuccaagguuauuggacatt

SEQ ID NO: 2291 - DNA, 21 bp, Artificial Sequence
  source: /note="Description of Artificial Sequence: Synthetic oligonucleotide"
  source: /note="Description of Combined DNA/RNA Molecule: Synthetic oligonucleotide"
ggacaccggaaacaauaaatt

SEQ ID NO: 2292 - DNA, 21 bp, Artificial Sequence
  source: /note="Description of Artificial Sequence: Synthetic oligonucleotide"
  source: /note="Description of Combined DNA/RNA Molecule: Synthetic oligonucleotide"
gaaacaauaaauuggaacatt

SEQ ID NO: 2293 - DNA, 21 bp, Artificial Sequence
  source: /note="Description of Artificial Sequence: Synthetic oligonucleotide"
  source: /note="Description of Combined DNA/RNA Molecule: Synthetic oligonucleotide"
auuggaacaccuccucaaatt

SEQ ID NO: 2294 - DNA, 21 bp, Artificial Sequence
  source: /note="Description of Artificial Sequence: Synthetic oligonucleotide"
  source: /note="Description of Combined DNA/RNA Molecule: Synthetic oligonucleotide"
uccucaaaccuaccacucatt

SEQ ID NO: 2295 - DNA, 21 bp, Artificial Sequence
  source: /note="Description of Artificial Sequence: Synthetic oligonucleotide"
  source: /note="Description of Combined DNA/RNA Molecule: Synthetic oligonucleotide"
cuaccacucaggaauguuutt

SEQ ID NO: 2296 - DNA, 21 bp, Artificial Sequence
  source: /note="Description of Artificial Sequence: Synthetic oligonucleotide"
  source: /note="Description of Combined DNA/RNA Molecule: Synthetic oligonucleotide"
aauguuugcuggggccgaatt

SEQ ID NO: 2297 - DNA, 21 bp, Artificial Sequence
  source: /note="Description of Artificial Sequence: Synthetic oligonucleotide"
  source: /note="Description of Combined DNA/RNA Molecule: Synthetic oligonucleotide"
ugcuggggccgaaagaacatt

SEQ ID NO: 2298 - DNA, 21 bp, Artificial Sequence
  source: /note="Description of Artificial Sequence: Synthetic oligonucleotide"
  source: /note="Description of Combined DNA/RNA Molecule: Synthetic oligonucleotide"
aaagaacaguccauugaaatt

SEQ ID NO: 2299 - DNA, 21 bp, Artificial Sequence
  source: /note="Description of Artificial Sequence: Synthetic oligonucleotide"
  source: /note="Description of Combined DNA/RNA Molecule: Synthetic oligonucleotide"
cauugaaagggaguauuactt

SEQ ID NO: 2300 - DNA, 21 bp, Artificial Sequence
  source: /note="Description of Artificial Sequence: Synthetic oligonucleotide"
  source: /note="Description of Combined DNA/RNA Molecule: Synthetic oligonucleotide"
ggaguauuacaaaaacaugtt

SEQ ID NO: 2301 - DNA, 21 bp, Artificial Sequence
  source: /note="Description of Artificial Sequence: Synthetic oligonucleotide"
  source: /note="Description of Combined DNA/RNA Molecule: Synthetic oligonucleotide"
aaaacauggccuuugcuugtt

SEQ ID NO: 2302 - DNA, 21 bp, Artificial Sequence
  source: /note="Description of Artificial Sequence: Synthetic oligonucleotide"
  source: /note="Description of Combined DNA/RNA Molecule: Synthetic oligonucleotide"
gccuuugcuugaaagaaaatt

SEQ ID NO: 2303 - DNA, 21 bp, Artificial Sequence
  source: /note="Description of Artificial Sequence: Synthetic oligonucleotide"
  source: /note="Description of Combined DNA/RNA Molecule: Synthetic oligonucleotide"
gaaagaaaauaccaaggaatt

SEQ ID NO: 2304 - DNA, 21 bp, Artificial Sequence
  source: /note="Description of Artificial Sequence: Synthetic oligonucleotide"
  source: /note="Description of Combined DNA/RNA Molecule: Synthetic oligonucleotide"
ccaaggaacaggaaacugatt

SEQ ID NO: 2305 - DNA, 21 bp, Artificial Sequence
  source: /note="Description of Artificial Sequence: Synthetic oligonucleotide"
  source: /note="Description of Combined DNA/RNA Molecule: Synthetic oligonucleotide"
aacugaucauuaaagccugtt

SEQ ID NO: 2306 - DNA, 21 bp, Artificial Sequence
  source: /note="Description of Artificial Sequence: Synthetic oligonucleotide"
  source: /note="Description of Combined DNA/RNA Molecule: Synthetic oligonucleotide"
uagcaggaaaccacggauatt

SEQ ID NO: 2307 - DNA, 21 bp, Artificial Sequence
  source: /note="Description of Artificial Sequence: Synthetic oligonucleotide"
  source: /note="Description of Combined DNA/RNA Molecule: Synthetic oligonucleotide"
uuggagguagcaggaaacctt

SEQ ID NO: 2308 - DNA, 21 bp, Artificial Sequence
  source: /note="Description of Artificial Sequence: Synthetic oligonucleotide"
  source: /note="Description of Combined DNA/RNA Molecule: Synthetic oligonucleotide"
aaaggcccaugguuggaggtt

SEQ ID NO: 2309 - DNA, 21 bp, Artificial Sequence
  source: /note="Description of Artificial Sequence: Synthetic oligonucleotide"
  source: /note="Description of Combined DNA/RNA Molecule: Synthetic oligonucleotide"
aaguauucccaaaaggccctt

SEQ ID NO: 2310 - DNA, 21 bp, Artificial Sequence
  source: /note="Description of Artificial Sequence: Synthetic oligonucleotide"
  source: /note="Description of Combined DNA/RNA Molecule: Synthetic oligonucleotide"
uuaaaaaacaaaguauucctt

SEQ ID NO: 2311 - DNA, 21 bp, Artificial Sequence
  source: /note="Description of Artificial Sequence: Synthetic oligonucleotide"
  source: /note="Description of Combined DNA/RNA Molecule: Synthetic oligonucleotide"
ggaagauuaaaaaacaaagtt

SEQ ID NO: 2312 - DNA, 21 bp, Artificial Sequence
  source: /note="Description of Artificial Sequence: Synthetic oligonucleotide"
  source: /note="Description of Combined DNA/RNA Molecule: Synthetic oligonucleotide"
ccagguuuuccccaggaagtt

SEQ ID NO: 2313 - DNA, 21 bp, Artificial Sequence
  source: /note="Description of Artificial Sequence: Synthetic oligonucleotide"
  source: /note="Description of Combined DNA/RNA Molecule: Synthetic oligonucleotide"
uccuguccccagguuuucctt

SEQ ID NO: 2314 - DNA, 21 bp, Artificial Sequence
  source: /note="Description of Artificial Sequence: Synthetic oligonucleotide"
  source: /note="Description of Combined DNA/RNA Molecule: Synthetic oligonucleotide"
auauguuugcuccuguccctt

SEQ ID NO: 2315 - DNA, 21 bp, Artificial Sequence
  source: /note="Description of Artificial Sequence: Synthetic oligonucleotide"
  source: /note="Description of Combined DNA/RNA Molecule: Synthetic oligonucleotide"
cugaaaugacauauguuugtt

SEQ ID NO: 2316 - DNA, 21 bp, Artificial Sequence
  source: /note="Description of Artificial Sequence: Synthetic oligonucleotide"
  source: /note="Description of Combined DNA/RNA Molecule: Synthetic oligonucleotide"
uauuuuuggugcugaaaugtt

SEQ ID NO: 2317 - DNA, 21 bp, Artificial Sequence
  source: /note="Description of Artificial Sequence: Synthetic oligonucleotide"
  source: /note="Description of Combined DNA/RNA Molecule: Synthetic oligonucleotide"
cacggaauauuuuuggugctt

SEQ ID NO: 2318 - DNA, 21 bp, Artificial Sequence
  source: /note="Description of Artificial Sequence: Synthetic oligonucleotide"
  source: /note="Description of Combined DNA/RNA Molecule: Synthetic oligonucleotide"
uucagaugcuccaacacggtt

SEQ ID NO: 2319 - DNA, 21 bp, Artificial Sequence
  source: /note="Description of Artificial Sequence: Synthetic oligonucleotide"
  source: /note="Description of Combined DNA/RNA Molecule: Synthetic oligonucleotide"
caauauuuucagaugcucctt

SEQ ID NO: 2320 - DNA, 21 bp, Artificial Sequence
  source: /note="Description of Artificial Sequence: Synthetic oligonucleotide"
  source: /note="Description of Combined DNA/RNA Molecule: Synthetic oligonucleotide"
cuugaaucacaauauuuuctt

SEQ ID NO: 2321 - DNA, 21 bp, Artificial Sequence
  source: /note="Description of Artificial Sequence: Synthetic oligonucleotide"
  source: /note="Description of Combined DNA/RNA Molecule: Synthetic oligonucleotide"
guauccauaaacuugaauctt

SEQ ID NO: 2322 - DNA, 21 bp, Artificial Sequence
  source: /note="Description of Artificial Sequence: Synthetic oligonucleotide"
  source: /note="Description of Combined DNA/RNA Molecule: Synthetic oligonucleotide"
caaaugcuucaguguaucctt

SEQ ID NO: 2323 - DNA, 21 bp, Artificial Sequence
  source: /note="Description of Artificial Sequence: Synthetic oligonucleotide"
  source: /note="Description of Combined DNA/RNA Molecule: Synthetic oligonucleotide"
uuguugcaucaaaugcuuctt

SEQ ID NO: 2324 - DNA, 21 bp, Artificial Sequence
  source: /note="Description of Artificial Sequence: Synthetic oligonucleotide"
  source: /note="Description of Combined DNA/RNA Molecule: Synthetic oligonucleotide"
uuuaauagagauuguugcatt

SEQ ID NO: 2325 - DNA, 21 bp, Artificial Sequence
  source: /note="Description of Artificial Sequence: Synthetic oligonucleotide"
  source: /note="Description of Combined DNA/RNA Molecule: Synthetic oligonucleotide"
auaacuuuuaauagagauutt

SEQ ID NO: 2326 - DNA, 21 bp, Artificial Sequence
  source: /note="Description of Artificial Sequence: Synthetic oligonucleotide"
  source: /note="Description of Combined DNA/RNA Molecule: Synthetic oligonucleotide"
uuuuuuaucaggauaacuutt

SEQ ID NO: 2327 - DNA, 21 bp, Artificial Sequence
  source: /note="Description of Artificial Sequence: Synthetic oligonucleotide"
  source: /note="Description of Combined DNA/RNA Molecule: Synthetic oligonucleotide"
uaacuaaauuuuuuaucagtt

SEQ ID NO: 2328 - DNA, 21 bp, Artificial Sequence
  source: /note="Description of Artificial Sequence: Synthetic oligonucleotide"
  source: /note="Description of Combined DNA/RNA Molecule: Synthetic oligonucleotide"
uggccugaggaguaacuaatt

SEQ ID NO: 2329 - DNA, 21 bp, Artificial Sequence
  source: /note="Description of Artificial Sequence: Synthetic oligonucleotide"
  source: /note="Description of Combined DNA/RNA Molecule: Synthetic oligonucleotide"
aaaugaacauggccugaggtt

SEQ ID NO: 2330 - DNA, 21 bp, Artificial Sequence
  source: /note="Description of Artificial Sequence: Synthetic oligonucleotide"
  source: /note="Description of Combined DNA/RNA Molecule: Synthetic oligonucleotide"
uucucugaggauaaaugaatt

SEQ ID NO: 2331 - DNA, 21 bp, Artificial Sequence
  source: /note="Description of Artificial Sequence: Synthetic oligonucleotide"
  source: /note="Description of Combined DNA/RNA Molecule: Synthetic oligonucleotide"
uuggaauuuauucucugagtt

SEQ ID NO: 2332 - DNA, 21 bp, Artificial Sequence
  source: /note="Description of Artificial Sequence: Synthetic oligonucleotide"
  source: /note="Description of Combined DNA/RNA Molecule: Synthetic oligonucleotide"
cagaguuuuggaauuuauutt

SEQ ID NO: 2333 - DNA, 21 bp, Artificial Sequence
  source: /note="Description of Artificial Sequence: Synthetic oligonucleotide"
  source: /note="Description of Combined DNA/RNA Molecule: Synthetic oligonucleotide"
uauuguuaagauugcagagtt

SEQ ID NO: 2334 - DNA, 21 bp, Artificial Sequence
  source: /note="Description of Artificial Sequence: Synthetic oligonucleotide"
  source: /note="Description of Combined DNA/RNA Molecule: Synthetic oligonucleotide"
uuuugguuguauuguuaagtt

SEQ ID NO: 2335 - DNA, 21 bp, Artificial Sequence
  source: /note="Description of Artificial Sequence: Synthetic oligonucleotide"
  source: /note="Description of Combined DNA/RNA Molecule: Synthetic oligonucleotide"
caggcaauuguuuugguugtt

SEQ ID NO: 2336 - DNA, 21 bp, Artificial Sequence
  source: /note="Description of Artificial Sequence: Synthetic oligonucleotide"
  source: /note="Description of Combined DNA/RNA Molecule: Synthetic oligonucleotide"
uuuguccuccaggcaauugtt

SEQ ID NO: 2337 - DNA, 21 bp, Artificial Sequence
  source: /note="Description of Artificial Sequence: Synthetic oligonucleotide"
  source: /note="Description of Combined DNA/RNA Molecule: Synthetic oligonucleotide"
aagaaacuggguuuugucctt

SEQ ID NO: 2338 - DNA, 21 bp, Artificial Sequence
  source: /note="Description of Artificial Sequence: Synthetic oligonucleotide"
  source: /note="Description of Combined DNA/RNA Molecule: Synthetic oligonucleotide"
aauacacauaagaaacuggtt

SEQ ID NO: 2339 - DNA, 21 bp, Artificial Sequence
  source: /note="Description of Artificial Sequence: Synthetic oligonucleotide"
  source: /note="Description of Combined DNA/RNA Molecule: Synthetic oligonucleotide"
acaacuuccaaauacacautt

SEQ ID NO: 2340 - DNA, 21 bp, Artificial Sequence
  source: /note="Description of Artificial Sequence: Synthetic oligonucleotide"
  source: /note="Description of Combined DNA/RNA Molecule: Synthetic oligonucleotide"
augcuuugauacaacuucctt

SEQ ID NO: 2341 - DNA, 21 bp, Artificial Sequence
  source: /note="Description of Artificial Sequence: Synthetic oligonucleotide"
  source: /note="Description of Combined DNA/RNA Molecule: Synthetic oligonucleotide"
uugaaaaaugcuuugauactt

SEQ ID NO: 2342 - DNA, 21 bp, Artificial Sequence
  source: /note="Description of Artificial Sequence: Synthetic oligonucleotide"
  source: /note="Description of Combined DNA/RNA Molecule: Synthetic oligonucleotide"
uucuuuuugauuuugaaaatt

SEQ ID NO: 2343 - DNA, 21 bp, Artificial Sequence
  source: /note="Description of Artificial Sequence: Synthetic oligonucleotide"
  source: /note="Description of Combined DNA/RNA Molecule: Synthetic oligonucleotide"
guuauuggcauucuuuuugtt

SEQ ID NO: 2344 - DNA, 21 bp, Artificial Sequence
  source: /note="Description of Artificial Sequence: Synthetic oligonucleotide"
  source: /note="Description of Combined DNA/RNA Molecule: Synthetic oligonucleotide"
auugucauagguuauuggctt

SEQ ID NO: 2345 - DNA, 21 bp, Artificial Sequence
  source: /note="Description of Artificial Sequence: Synthetic oligonucleotide"
  source: /note="Description of Combined DNA/RNA Molecule: Synthetic oligonucleotide"
agaaauccauugucauaggtt

SEQ ID NO: 2346 - DNA, 21 bp, Artificial Sequence
  source: /note="Description of Artificial Sequence: Synthetic oligonucleotide"
  source: /note="Description of Combined DNA/RNA Molecule: Synthetic oligonucleotide"
augaaugaagagaaauccatt

SEQ ID NO: 2347 - DNA, 21 bp, Artificial Sequence
  source: /note="Description of Artificial Sequence: Synthetic oligonucleotide"
  source: /note="Description of Combined DNA/RNA Molecule: Synthetic oligonucleotide"
agguuugucuguaugaaugtt

SEQ ID NO: 2348 - DNA, 21 bp, Artificial Sequence
  source: /note="Description of Artificial Sequence: Synthetic oligonucleotide"
  source: /note="Description of Combined DNA/RNA Molecule: Synthetic oligonucleotide"
guauaaacagguuugucugtt

SEQ ID NO: 2349 - DNA, 21 bp, Artificial Sequence
  source: /note="Description of Artificial Sequence: Synthetic oligonucleotide"
  source: /note="Description of Combined DNA/RNA Molecule: Synthetic oligonucleotide"
acuggucuggaguauaaactt

SEQ ID NO: 2350 - DNA, 21 bp, Artificial Sequence
  source: /note="Description of Artificial Sequence: Synthetic oligonucleotide"
  source: /note="Description of Combined DNA/RNA Molecule: Synthetic oligonucleotide"
aacuuuuacugacuggucutt

SEQ ID NO: 2351 - DNA, 21 bp, Artificial Sequence
  source: /note="Description of Artificial Sequence: Synthetic oligonucleotide"
  source: /note="Description of Combined DNA/RNA Molecule: Synthetic oligonucleotide"
auaaacucuaacuuuuacutt

SEQ ID NO: 2352 - DNA, 21 bp, Artificial Sequence
  source: /note="Description of Artificial Sequence: Synthetic oligonucleotide"
  source: /note="Description of Combined DNA/RNA Molecule: Synthetic oligonucleotide"
cauucaacgaauaaacucutt

SEQ ID NO: 2353 - DNA, 21 bp, Artificial Sequence
  source: /note="Description of Artificial Sequence: Synthetic oligonucleotide"
  source: /note="Description of Combined DNA/RNA Molecule: Synthetic oligonucleotide"
uucaagucgucauucaacgtt

SEQ ID NO: 2354 - DNA, 21 bp, Artificial Sequence
  source: /note="Description of Artificial Sequence: Synthetic oligonucleotide"
  source: /note="Description of Combined DNA/RNA Molecule: Synthetic oligonucleotide"
ucuuuuggcuggcuucaagtt

SEQ ID NO: 2355 - DNA, 21 bp, Artificial Sequence
  source: /note="Description of Artificial Sequence: Synthetic oligonucleotide"
  source: /note="Description of Combined DNA/RNA Molecule: Synthetic oligonucleotide"
caguuucucuuuuggcuggtt

SEQ ID NO: 2356 - DNA, 21 bp, Artificial Sequence
  source: /note="Description of Artificial Sequence: Synthetic oligonucleotide"
  source: /note="Description of Combined DNA/RNA Molecule: Synthetic oligonucleotide"
augaaaguuaagacaguuutt

SEQ ID NO: 2357 - DNA, 21 bp, Artificial Sequence
  source: /note="Description of Artificial Sequence: Synthetic oligonucleotide"
  source: /note="Description of Combined DNA/RNA Molecule: Synthetic oligonucleotide"
uucaggaucuaugaaaguutt

SEQ ID NO: 2358 - DNA, 21 bp, Artificial Sequence
  source: /note="Description of Artificial Sequence: Synthetic oligonucleotide"
  source: /note="Description of Combined DNA/RNA Molecule: Synthetic oligonucleotide"
ugauccuucaggaucuaugtt

SEQ ID NO: 2359 - DNA, 21 bp, Artificial Sequence
  source: /note="Description of Artificial Sequence: Synthetic oligonucleotide"
  source: /note="Description of Combined DNA/RNA Molecule: Synthetic oligonucleotide"
ugucaacuucugauccuuctt

SEQ ID NO: 2360 - DNA, 21 bp, Artificial Sequence
  source: /note="Description of Artificial Sequence: Synthetic oligonucleotide"
  source: /note="Description of Combined DNA/RNA Molecule: Synthetic oligonucleotide"
aauuucuucuaccaugucatt

SEQ ID NO: 2361 - DNA, 21 bp, Artificial Sequence
  source: /note="Description of Artificial Sequence: Synthetic oligonucleotide"
  source: /note="Description of Combined DNA/RNA Molecule: Synthetic oligonucleotide"
caauaugaucaauuucuuctt

SEQ ID NO: 2362 - DNA, 21 bp, Artificial Sequence
  source: /note="Description of Artificial Sequence: Synthetic oligonucleotide"
  source: /note="Description of Combined DNA/RNA Molecule: Synthetic oligonucleotide"
agauaauuccaauaugauctt

SEQ ID NO: 2363 - DNA, 21 bp, Artificial Sequence
  source: /note="Description of Artificial Sequence: Synthetic oligonucleotide"
  source: /note="Description of Combined DNA/RNA Molecule: Synthetic oligonucleotide"
caggaaaagagauaauucctt

SEQ ID NO: 2364 - DNA, 21 bp, Artificial Sequence
  source: /note="Description of Artificial Sequence: Synthetic oligonucleotide"
  source: /note="Description of Combined DNA/RNA Molecule: Synthetic oligonucleotide"
cuugaagucaggaaaagagtt

SEQ ID NO: 2365 - DNA, 21 bp, Artificial Sequence
  source: /note="Description of Artificial Sequence: Synthetic oligonucleotide"
  source: /note="Description of Combined DNA/RNA Molecule: Synthetic oligonucleotide"
uuagacggaaucuugaagutt

SEQ ID NO: 2366 - DNA, 21 bp, Artificial Sequence
  source: /note="Description of Artificial Sequence: Synthetic oligonucleotide"
  source: /note="Description of Combined DNA/RNA Molecule: Synthetic oligonucleotide"
cauaucuaggauuagacggtt

SEQ ID NO: 2367 - DNA, 21 bp, Artificial Sequence
  source: /note="Description of Artificial Sequence: Synthetic oligonucleotide"
  source: /note="Description of Combined DNA/RNA Molecule: Synthetic oligonucleotide"
uccacauaccauaucuaggtt

SEQ ID NO: 2368 - DNA, 21 bp, Artificial Sequence
  source: /note="Description of Artificial Sequence: Synthetic oligonucleotide"
  source: /note="Description of Combined DNA/RNA Molecule: Synthetic oligonucleotide"
uuagccuugaucguccacatt

SEQ ID NO: 2369 - DNA, 21 bp, Artificial Sequence
  source: /note="Description of Artificial Sequence: Synthetic oligonucleotide"
  source: /note="Description of Combined DNA/RNA Molecule: Synthetic oligonucleotide"
uuauauuuagccuugaucgtt

SEQ ID NO: 2370 - DNA, 21 bp, Artificial Sequence
  source: /note="Description of Artificial Sequence: Synthetic oligonucleotide"
  source: /note="Description of Combined DNA/RNA Molecule: Synthetic oligonucleotide"
ugaaaaguccucuuuauautt

SEQ ID NO: 2371 - DNA, 21 bp, Artificial Sequence
  source: /note="Description of Artificial Sequence: Synthetic oligonucleotide"
  source: /note="Description of Combined DNA/RNA Molecule: Synthetic oligonucleotide"
caguuguugaaaaguccuctt

SEQ ID NO: 2372 - DNA, 21 bp, Artificial Sequence
  source: /note="Description of Artificial Sequence: Synthetic oligonucleotide"
  source: /note="Description of Combined DNA/RNA Molecule: Synthetic oligonucleotide"
aaauaugcgguuccaguugtt

SEQ ID NO: 2373 - DNA, 21 bp, Artificial Sequence
  source: /note="Description of Artificial Sequence: Synthetic oligonucleotide"
  source: /note="Description of Combined DNA/RNA Molecule: Synthetic oligonucleotide"
uuuaacuucaaaauaugcgtt

SEQ ID NO: 2374 - DNA, 21 bp, Artificial Sequence
  source: /note="Description of Artificial Sequence: Synthetic oligonucleotide"
  source: /note="Description of Combined DNA/RNA Molecule: Synthetic oligonucleotide"
aagacauauucuuuaacuutt

SEQ ID NO: 2375 - DNA, 21 bp, Artificial Sequence
  source: /note="Description of Artificial Sequence: Synthetic oligonucleotide"
  source: /note="Description of Combined DNA/RNA Molecule: Synthetic oligonucleotide"
aauguggcaagacauauuctt

SEQ ID NO: 2376 - DNA, 21 bp, Artificial Sequence
  source: /note="Description of Artificial Sequence: Synthetic oligonucleotide"
  source: /note="Description of Combined DNA/RNA Molecule: Synthetic oligonucleotide"
uugagacagaaaaauguggtt

SEQ ID NO: 2377 - DNA, 21 bp, Artificial Sequence
  source: /note="Description of Artificial Sequence: Synthetic oligonucleotide"
  source: /note="Description of Combined DNA/RNA Molecule: Synthetic oligonucleotide"
ucuggcucgauugagacagtt

SEQ ID NO: 2378 - DNA, 21 bp, Artificial Sequence
  source: /note="Description of Artificial Sequence: Synthetic oligonucleotide"
  source: /note="Description of Combined DNA/RNA Molecule: Synthetic oligonucleotide"
uuauauucuggcucgauugtt

SEQ ID NO: 2379 - DNA, 21 bp, Artificial Sequence
  source: /note="Description of Artificial Sequence: Synthetic oligonucleotide"
  source: /note="Description of Combined DNA/RNA Molecule: Synthetic oligonucleotide"
aaccaaugaaauuauauuctt

SEQ ID NO: 2380 - DNA, 21 bp, Artificial Sequence
  source: /note="Description of Artificial Sequence: Synthetic oligonucleotide"
  source: /note="Description of Combined DNA/RNA Molecule: Synthetic oligonucleotide"
uaaaguucuuguaaccaautt

SEQ ID NO: 2381 - DNA, 21 bp, Artificial Sequence
  source: /note="Description of Artificial Sequence: Synthetic oligonucleotide"
  source: /note="Description of Combined DNA/RNA Molecule: Synthetic oligonucleotide"
ucaaaauucuuaaaguucutt

SEQ ID NO: 2382 - DNA, 21 bp, Artificial Sequence
  source: /note="Description of Artificial Sequence: Synthetic oligonucleotide"
  source: /note="Description of Combined DNA/RNA Molecule: Synthetic oligonucleotide"
uauaguaauuucaaaauuctt

SEQ ID NO: 2383 - DNA, 21 bp, Artificial Sequence
  source: /note="Description of Artificial Sequence: Synthetic oligonucleotide"
  source: /note="Description of Combined DNA/RNA Molecule: Synthetic oligonucleotide"
uugcuuuuauaguaauuuctt

SEQ ID NO: 2384 - DNA, 21 bp, Artificial Sequence
  source: /note="Description of Artificial Sequence: Synthetic oligonucleotide"
  source: /note="Description of Combined DNA/RNA Molecule: Synthetic oligonucleotide"
uauaaaaauaucuugcuuutt

SEQ ID NO: 2385 - DNA, 21 bp, Artificial Sequence
  source: /note="Description of Artificial Sequence: Synthetic oligonucleotide"
  source: /note="Description of Combined DNA/RNA Molecule: Synthetic oligonucleotide"
uacuuuauuauaaaaauautt

SEQ ID NO: 2386 - DNA, 21 bp, Artificial Sequence
  source: /note="Description of Artificial Sequence: Synthetic oligonucleotide"
  source: /note="Description of Combined DNA/RNA Molecule: Synthetic oligonucleotide"
ucagccucagugacuacuutt

SEQ ID NO: 2387 - DNA, 21 bp, Artificial Sequence
  source: /note="Description of Artificial Sequence: Synthetic oligonucleotide"
  source: /note="Description of Combined DNA/RNA Molecule: Synthetic oligonucleotide"
auaaacgucagccucagugtt

SEQ ID NO: 2388 - DNA, 21 bp, Artificial Sequence
  source: /note="Description of Artificial Sequence: Synthetic oligonucleotide"
  source: /note="Description of Combined DNA/RNA Molecule: Synthetic oligonucleotide"
uccaaaugugauauaaacgtt

SEQ ID NO: 2389 - DNA, 21 bp, Artificial Sequence
  source: /note="Description of Artificial Sequence: Synthetic oligonucleotide"
  source: /note="Description of Combined DNA/RNA Molecule: Synthetic oligonucleotide"
uucucuuauuccaaaugugtt

SEQ ID NO: 2390 - DNA, 21 bp, Artificial Sequence
  source: /note="Description of Artificial Sequence: Synthetic oligonucleotide"
  source: /note="Description of Combined DNA/RNA Molecule: Synthetic oligonucleotide"
uuuuaagucuucucuuauutt

SEQ ID NO: 2391 - DNA, 21 bp, Artificial Sequence
  source: /note="Description of Artificial Sequence: Synthetic oligonucleotide"
  source: /note="Description of Combined DNA/RNA Molecule: Synthetic oligonucleotide"
uuuuugaucaucuuuuaagtt

SEQ ID NO: 2392 - DNA, 21 bp, Artificial Sequence
  source: /note="Description of Artificial Sequence: Synthetic oligonucleotide"
  source: /note="Description of Combined DNA/RNA Molecule: Synthetic oligonucleotide"
ucauuucuuuuugaucauctt

SEQ ID NO: 2393 - DNA, 21 bp, Artificial Sequence
  source: /note="Description of Artificial Sequence: Synthetic oligonucleotide"
  source: /note="Description of Combined DNA/RNA Molecule: Synthetic oligonucleotide"
auugcuguuugcaucauuutt

SEQ ID NO: 2394 - DNA, 21 bp, Artificial Sequence
  source: /note="Description of Artificial Sequence: Synthetic oligonucleotide"
  source: /note="Description of Combined DNA/RNA Molecule: Synthetic oligonucleotide"
uuguguuuugcauugcugutt

SEQ ID NO: 2395 - DNA, 21 bp, Artificial Sequence
  source: /note="Description of Artificial Sequence: Synthetic oligonucleotide"
  source: /note="Description of Combined DNA/RNA Molecule: Synthetic oligonucleotide"
uuuaucaacauuguguuuutt

SEQ ID NO: 2396 - DNA, 21 bp, Artificial Sequence
  source: /note="Description of Artificial Sequence: Synthetic oligonucleotide"
  source: /note="Description of Combined DNA/RNA Molecule: Synthetic oligonucleotide"
auuccauuuaucaacauugtt

SEQ ID NO: 2397 - DNA, 21 bp, Artificial Sequence
  source: /note="Description of Artificial Sequence: Synthetic oligonucleotide"
  source: /note="Description of Combined DNA/RNA Molecule: Synthetic oligonucleotide"
augugacuugagcaauucctt

SEQ ID NO: 2398 - DNA, 21 bp, Artificial Sequence
  source: /note="Description of Artificial Sequence: Synthetic oligonucleotide"
  source: /note="Description of Combined DNA/RNA Molecule: Synthetic oligonucleotide"
aaucaaaugugacuugagctt

SEQ ID NO: 2399 - DNA, 21 bp, Artificial Sequence
  source: /note="Description of Artificial Sequence: Synthetic oligonucleotide"
  source: /note="Description of Combined DNA/RNA Molecule: Synthetic oligonucleotide"
ugcuguuucagaaucaaautt

SEQ ID NO: 2400 - DNA, 21 bp, Artificial Sequence
  source: /note="Description of Artificial Sequence: Synthetic oligonucleotide"
  source: /note="Description of Combined DNA/RNA Molecule: Synthetic oligonucleotide"
uucuuugacugcuguuucatt

SEQ ID NO: 2401 - DNA, 21 bp, Artificial Sequence
  source: /note="Description of Artificial Sequence: Synthetic oligonucleotide"
  source: /note="Description of Combined DNA/RNA Molecule: Synthetic oligonucleotide"
guaguaugacaguucuuugtt

SEQ ID NO: 2402 - DNA, 21 bp, Artificial Sequence
  source: /note="Description of Artificial Sequence: Synthetic oligonucleotide"
  source: /note="Description of Combined DNA/RNA Molecule: Synthetic oligonucleotide"
ucuucuaaacuguaguaugtt

SEQ ID NO: 2403 - DNA, 21 bp, Artificial Sequence
  source: /note="Description of Artificial Sequence: Synthetic oligonucleotide"
  source: /note="Description of Combined DNA/RNA Molecule: Synthetic oligonucleotide"
guuuaaaucuucuaaacugtt

SEQ ID NO: 2404 - DNA, 21 bp, Artificial Sequence
  source: /note="Description of Artificial Sequence: Synthetic oligonucleotide"
  source: /note="Description of Combined DNA/RNA Molecule: Synthetic oligonucleotide"
uaaagguacuuguuguuuatt

SEQ ID NO: 2405 - DNA, 21 bp, Artificial Sequence
  source: /note="Description of Artificial Sequence: Synthetic oligonucleotide"
  source: /note="Description of Combined DNA/RNA Molecule: Synthetic oligonucleotide"
agcaauauaaagguacuugtt

SEQ ID NO: 2406 - DNA, 21 bp, Artificial Sequence
  source: /note="Description of Artificial Sequence: Synthetic oligonucleotide"
  source: /note="Description of Combined DNA/RNA Molecule: Synthetic oligonucleotide"
uaugacuguuacagcaauatt

SEQ ID NO: 2407 - DNA, 21 bp, Artificial Sequence
  source: /note="Description of Artificial Sequence: Synthetic oligonucleotide"
  source: /note="Description of Combined DNA/RNA Molecule: Synthetic oligonucleotide"
uguagacucuaugacuguutt

SEQ ID NO: 2408 - DNA, 21 bp, Artificial Sequence
  source: /note="Description of Artificial Sequence: Synthetic oligonucleotide"
  source: /note="Description of Combined DNA/RNA Molecule: Synthetic oligonucleotide"
aaauccaccuguagacucutt

SEQ ID NO: 2409 - DNA, 21 bp, Artificial Sequence
  source: /note="Description of Artificial Sequence: Synthetic oligonucleotide"
  source: /note="Description of Combined DNA/RNA Molecule: Synthetic oligonucleotide"
cugccucuucagaaaaucctt

SEQ ID NO: 2410 - DNA, 21 bp, Artificial Sequence
  source: /note="Description of Artificial Sequence: Synthetic oligonucleotide"
  source: /note="Description of Combined DNA/RNA Molecule: Synthetic oligonucleotide"
cagguauuucugccucuuctt

SEQ ID NO: 2411 - DNA, 21 bp, Artificial Sequence
  source: /note="Description of Artificial Sequence: Synthetic oligonucleotide"
  source: /note="Description of Combined DNA/RNA Molecule: Synthetic oligonucleotide"
uuugaugccagguauuucutt

SEQ ID NO: 2412 - DNA, 21 bp, Artificial Sequence
  source: /note="Description of Artificial Sequence: Synthetic oligonucleotide"
  source: /note="Description of Combined DNA/RNA Molecule: Synthetic oligonucleotide"
gagaggacauauuugaugctt

SEQ ID NO: 2413 - DNA, 21 bp, Artificial Sequence
  source: /note="Description of Artificial Sequence: Synthetic oligonucleotide"
  source: /note="Description of Combined DNA/RNA Molecule: Synthetic oligonucleotide"
uuuguagggagagaggacatt

SEQ ID NO: 2414 - DNA, 21 bp, Artificial Sequence
  source: /note="Description of Artificial Sequence: Synthetic oligonucleotide"
  source: /note="Description of Combined DNA/RNA Molecule: Synthetic oligonucleotide"
aggaguagcaaccaaauuctt

SEQ ID NO: 2415 - DNA, 21 bp, Artificial Sequence
  source: /note="Description of Artificial Sequence: Synthetic oligonucleotide"
  source: /note="Description of Combined DNA/RNA Molecule: Synthetic oligonucleotide"
ucaggaaaagaggaguagctt

SEQ ID NO: 2416 - DNA, 21 bp, Artificial Sequence
  source: /note="Description of Artificial Sequence: Synthetic oligonucleotide"
  source: /note="Description of Combined DNA/RNA Molecule: Synthetic oligonucleotide"
ccaggcuucaggaaaagagtt

SEQ ID NO: 2417 - DNA, 21 bp, Artificial Sequence
  source: /note="Description of Artificial Sequence: Synthetic oligonucleotide"
  source: /note="Description of Combined DNA/RNA Molecule: Synthetic oligonucleotide"
ugggauauggaaucccaggtt

SEQ ID NO: 2418 - DNA, 21 bp, Artificial Sequence
  source: /note="Description of Artificial Sequence: Synthetic oligonucleotide"
  source: /note="Description of Combined DNA/RNA Molecule: Synthetic oligonucleotide"
ugcaccuugaugggauaugtt

SEQ ID NO: 2419 - DNA, 21 bp, Artificial Sequence
  source: /note="Description of Artificial Sequence: Synthetic oligonucleotide"
  source: /note="Description of Combined DNA/RNA Molecule: Synthetic oligonucleotide"
uuaaccugcaccuugauggtt

SEQ ID NO: 2420 - DNA, 21 bp, Artificial Sequence
  source: /note="Description of Artificial Sequence: Synthetic oligonucleotide"
  source: /note="Description of Combined DNA/RNA Molecule: Synthetic oligonucleotide"
caagcgaaucuuuaaccugtt

SEQ ID NO: 2421 - DNA, 21 bp, Artificial Sequence
  source: /note="Description of Artificial Sequence: Synthetic oligonucleotide"
  source: /note="Description of Combined DNA/RNA Molecule: Synthetic oligonucleotide"
uaccaacuggucaagcgaatt

SEQ ID NO: 2422 - DNA, 21 bp, Artificial Sequence
  source: /note="Description of Artificial Sequence: Synthetic oligonucleotide"
  source: /note="Description of Combined DNA/RNA Molecule: Synthetic oligonucleotide"
gacuccuccuaccaacuggtt

SEQ ID NO: 2423 - DNA, 21 bp, Artificial Sequence
  source: /note="Description of Artificial Sequence: Synthetic oligonucleotide"
  source: /note="Description of Combined DNA/RNA Molecule: Synthetic oligonucleotide"
guguuacugggacuccucctt

SEQ ID NO: 2424 - DNA, 21 bp, Artificial Sequence
  source: /note="Description of Artificial Sequence: Synthetic oligonucleotide"
  source: /note="Description of Combined DNA/RNA Molecule: Synthetic oligonucleotide"
ugugcauucaguguuacugtt

SEQ ID NO: 2425 - DNA, 21 bp, Artificial Sequence
  source: /note="Description of Artificial Sequence: Synthetic oligonucleotide"
  source: /note="Description of Combined DNA/RNA Molecule: Synthetic oligonucleotide"
aucaauuguuugugcauuctt

SEQ ID NO: 2426 - DNA, 21 bp, Artificial Sequence
  source: /note="Description of Artificial Sequence: Synthetic oligonucleotide"
  source: /note="Description of Combined DNA/RNA Molecule: Synthetic oligonucleotide"
uugguuuacaucaauuguutt

SEQ ID NO: 2427 - DNA, 21 bp, Artificial Sequence
  source: /note="Description of Artificial Sequence: Synthetic oligonucleotide"
  source: /note="Description of Combined DNA/RNA Molecule: Synthetic oligonucleotide"
ucagaugucucuugguuuatt

SEQ ID NO: 2428 - DNA, 21 bp, Artificial Sequence
  source: /note="Description of Artificial Sequence: Synthetic oligonucleotide"
  source: /note="Description of Combined DNA/RNA Molecule: Synthetic oligonucleotide"
cuuggauccaagucagaugtt

SEQ ID NO: 2429 - DNA, 21 bp, Artificial Sequence
  source: /note="Description of Artificial Sequence: Synthetic oligonucleotide"
  source: /note="Description of Combined DNA/RNA Molecule: Synthetic oligonucleotide"
uuacacuuuugcuuggauctt

SEQ ID NO: 2430 - DNA, 21 bp, Artificial Sequence
  source: /note="Description of Artificial Sequence: Synthetic oligonucleotide"
  source: /note="Description of Combined DNA/RNA Molecule: Synthetic oligonucleotide"
aacacguguuacacuuuugtt

SEQ ID NO: 2431 - DNA, 21 bp, Artificial Sequence
  source: /note="Description of Artificial Sequence: Synthetic oligonucleotide"
  source: /note="Description of Combined DNA/RNA Molecule: Synthetic oligonucleotide"
uccaucaucaacacguguutt

SEQ ID NO: 2432 - DNA, 21 bp, Artificial Sequence
  source: /note="Description of Artificial Sequence: Synthetic oligonucleotide"
  source: /note="Description of Combined DNA/RNA Molecule: Synthetic oligonucleotide"
aaaggaagcuacuccaucatt

SEQ ID NO: 2433 - DNA, 21 bp, Artificial Sequence
  source: /note="Description of Artificial Sequence: Synthetic oligonucleotide"
  source: /note="Description of Combined DNA/RNA Molecule: Synthetic oligonucleotide"
uaagcacaaaggaagcuactt

SEQ ID NO: 2434 - DNA, 21 bp, Artificial Sequence
  source: /note="Description of Artificial Sequence: Synthetic oligonucleotide"
  source: /note="Description of Combined DNA/RNA Molecule: Synthetic oligonucleotide"
uccagaugggagauuaagctt

SEQ ID NO: 2435 - DNA, 21 bp, Artificial Sequence
  source: /note="Description of Artificial Sequence: Synthetic oligonucleotide"
  source: /note="Description of Combined DNA/RNA Molecule: Synthetic oligonucleotide"
gcaccgucacuccagauggtt

SEQ ID NO: 2436 - DNA, 21 bp, Artificial Sequence
  source: /note="Description of Artificial Sequence: Synthetic oligonucleotide"
  source: /note="Description of Combined DNA/RNA Molecule: Synthetic oligonucleotide"
uuaaacuccagcaccgucatt

SEQ ID NO: 2437 - DNA, 21 bp, Artificial Sequence
  source: /note="Description of Artificial Sequence: Synthetic oligonucleotide"
  source: /note="Description of Combined DNA/RNA Molecule: Synthetic oligonucleotide"
uuugacauuaaacuccagctt

SEQ ID NO: 2438 - DNA, 21 bp, Artificial Sequence
  source: /note="Description of Artificial Sequence: Synthetic oligonucleotide"
  source: /note="Description of Combined DNA/RNA Molecule: Synthetic oligonucleotide"
uggagcaucaguuuugacatt

SEQ ID NO: 2439 - DNA, 21 bp, Artificial Sequence
  source: /note="Description of Artificial Sequence: Synthetic oligonucleotide"
  source: /note="Description of Combined DNA/RNA Molecule: Synthetic oligonucleotide"
cuggaagaucuggagcauctt

SEQ ID NO: 2440 - DNA, 21 bp, Artificial Sequence
  source: /note="Description of Artificial Sequence: Synthetic oligonucleotide"
  source: /note="Description of Combined DNA/RNA Molecule: Synthetic oligonucleotide"
uuuucuucuggaagaucugtt

SEQ ID NO: 2441 - DNA, 21 bp, Artificial Sequence
  source: /note="Description of Artificial Sequence: Synthetic oligonucleotide"
  source: /note="Description of Combined DNA/RNA Molecule: Synthetic oligonucleotide"
uucccuggccugauuuucutt

SEQ ID NO: 2442 - DNA, 21 bp, Artificial Sequence
  source: /note="Description of Artificial Sequence: Synthetic oligonucleotide"
  source: /note="Description of Combined DNA/RNA Molecule: Synthetic oligonucleotide"
ucgguaaccuucccuggcctt

SEQ ID NO: 2443 - DNA, 21 bp, Artificial Sequence
  source: /note="Description of Artificial Sequence: Synthetic oligonucleotide"
  source: /note="Description of Combined DNA/RNA Molecule: Synthetic oligonucleotide"
uaugcuauugcucgguaactt

SEQ ID NO: 2444 - DNA, 21 bp, Artificial Sequence
  source: /note="Description of Artificial Sequence: Synthetic oligonucleotide"
  source: /note="Description of Combined DNA/RNA Molecule: Synthetic oligonucleotide"
ugagagaugaguaugcuautt

SEQ ID NO: 2445 - DNA, 21 bp, Artificial Sequence
  source: /note="Description of Artificial Sequence: Synthetic oligonucleotide"
  source: /note="Description of Combined DNA/RNA Molecule: Synthetic oligonucleotide"
uuuggcugagagaugaguatt

SEQ ID NO: 2446 - DNA, 21 bp, Artificial Sequence
  source: /note="Description of Artificial Sequence: Synthetic oligonucleotide"
  source: /note="Description of Combined DNA/RNA Molecule: Synthetic oligonucleotide"
auauaaagguaacuuuggctt

SEQ ID NO: 2447 - DNA, 21 bp, Artificial Sequence
  source: /note="Description of Artificial Sequence: Synthetic oligonucleotide"
  source: /note="Description of Combined DNA/RNA Molecule: Synthetic oligonucleotide"
aguccaaucaauauaaaggtt

SEQ ID NO: 2448 - DNA, 21 bp, Artificial Sequence
  source: /note="Description of Artificial Sequence: Synthetic oligonucleotide"
  source: /note="Description of Combined DNA/RNA Molecule: Synthetic oligonucleotide"
uaugguuaucaguccaauctt

SEQ ID NO: 2449 - DNA, 21 bp, Artificial Sequence
  source: /note="Description of Artificial Sequence: Synthetic oligonucleotide"
  source: /note="Description of Combined DNA/RNA Molecule: Synthetic oligonucleotide"
aaagccuuaugguuaucagtt

SEQ ID NO: 2450 - DNA, 21 bp, Artificial Sequence
  source: /note="Description of Artificial Sequence: Synthetic oligonucleotide"
  source: /note="Description of Combined DNA/RNA Molecule: Synthetic oligonucleotide"
ucucccacuagcaaagccutt

SEQ ID NO: 2451 - DNA, 21 bp, Artificial Sequence
  source: /note="Description of Artificial Sequence: Synthetic oligonucleotide"
  source: /note="Description of Combined DNA/RNA Molecule: Synthetic oligonucleotide"
uauucagauguucucccactt

SEQ ID NO: 2452 - DNA, 21 bp, Artificial Sequence
  source: /note="Description of Artificial Sequence: Synthetic oligonucleotide"
  source: /note="Description of Combined DNA/RNA Molecule: Synthetic oligonucleotide"
uaacaauaauauucagaugtt

SEQ ID NO: 2453 - DNA, 21 bp, Artificial Sequence
  source: /note="Description of Artificial Sequence: Synthetic oligonucleotide"
  source: /note="Description of Combined DNA/RNA Molecule: Synthetic oligonucleotide"
uuuggggguaacaauaauatt

SEQ ID NO: 2454 - DNA, 21 bp, Artificial Sequence
  source: /note="Description of Artificial Sequence: Synthetic oligonucleotide"
  source: /note="Description of Combined DNA/RNA Molecule: Synthetic oligonucleotide"
caauauaugggcuuuugggtt

SEQ ID NO: 2455 - DNA, 21 bp, Artificial Sequence
  source: /note="Description of Artificial Sequence: Synthetic oligonucleotide"
  source: /note="Description of Combined DNA/RNA Molecule: Synthetic oligonucleotide"
ucaauauaugggcuuuuggtt

SEQ ID NO: 2456 - DNA, 21 bp, Artificial Sequence
  source: /note="Description of Artificial Sequence: Synthetic oligonucleotide"
  source: /note="Description of Combined DNA/RNA Molecule: Synthetic oligonucleotide"
gucaauauaugggcuuuugtt

SEQ ID NO: 2457 - DNA, 21 bp, Artificial Sequence
  source: /note="Description of Artificial Sequence: Synthetic oligonucleotide"
  source: /note="Description of Combined DNA/RNA Molecule: Synthetic oligonucleotide"
ugucaauauaugggcuuuutt

SEQ ID NO: 2458 - DNA, 21 bp, Artificial Sequence
  source: /note="Description of Artificial Sequence: Synthetic oligonucleotide"
  source: /note="Description of Combined DNA/RNA Molecule: Synthetic oligonucleotide"
uugucaauauaugggcuuutt

SEQ ID NO: 2459 - DNA, 21 bp, Artificial Sequence
  source: /note="Description of Artificial Sequence: Synthetic oligonucleotide"
  source: /note="Description of Combined DNA/RNA Molecule: Synthetic oligonucleotide"
uuugucaauauaugggcuutt

SEQ ID NO: 2460 - DNA, 21 bp, Artificial Sequence
  source: /note="Description of Artificial Sequence: Synthetic oligonucleotide"
  source: /note="Description of Combined DNA/RNA Molecule: Synthetic oligonucleotide"
uuuugucaauauaugggcutt

SEQ ID NO: 2461 - DNA, 21 bp, Artificial Sequence
  source: /note="Description of Artificial Sequence: Synthetic oligonucleotide"
  source: /note="Description of Combined DNA/RNA Molecule: Synthetic oligonucleotide"
auuuugucaauauaugggctt

SEQ ID NO: 2462 - DNA, 21 bp, Artificial Sequence
  source: /note="Description of Artificial Sequence: Synthetic oligonucleotide"
  source: /note="Description of Combined DNA/RNA Molecule: Synthetic oligonucleotide"
uauuuugucaauauaugggtt

SEQ ID NO: 2463 - DNA, 21 bp, Artificial Sequence
  source: /note="Description of Artificial Sequence: Synthetic oligonucleotide"
  source: /note="Description of Combined DNA/RNA Molecule: Synthetic oligonucleotide"
uuauuuugucaauauauggtt

SEQ ID NO: 2464 - DNA, 21 bp, Artificial Sequence
  source: /note="Description of Artificial Sequence: Synthetic oligonucleotide"
  source: /note="Description of Combined DNA/RNA Molecule: Synthetic oligonucleotide"
guuauuuugucaauauaugtt

SEQ ID NO: 2465 - DNA, 21 bp, Artificial Sequence
  source: /note="Description of Artificial Sequence: Synthetic oligonucleotide"
  source: /note="Description of Combined DNA/RNA Molecule: Synthetic oligonucleotide"
aguuauuuugucaauauautt

SEQ ID NO: 2466 - DNA, 21 bp, Artificial Sequence
  source: /note="Description of Artificial Sequence: Synthetic oligonucleotide"
  source: /note="Description of Combined DNA/RNA Molecule: Synthetic oligonucleotide"
gaguuauuuugucaauauatt

SEQ ID NO: 2467 - DNA, 21 bp, Artificial Sequence
  source: /note="Description of Artificial Sequence: Synthetic oligonucleotide"
  source: /note="Description of Combined DNA/RNA Molecule: Synthetic oligonucleotide"
ugaguuauuuugucaauautt

SEQ ID NO: 2468 - DNA, 21 bp, Artificial Sequence
  source: /note="Description of Artificial Sequence: Synthetic oligonucleotide"
  source: /note="Description of Combined DNA/RNA Molecule: Synthetic oligonucleotide"
gugaguuauuuugucaauatt

SEQ ID NO: 2469 - DNA, 21 bp, Artificial Sequence
  source: /note="Description of Artificial Sequence: Synthetic oligonucleotide"
  source: /note="Description of Combined DNA/RNA Molecule: Synthetic oligonucleotide"
agugaguuauuuugucaautt

SEQ ID NO: 2470 - DNA, 21 bp, Artificial Sequence
  source: /note="Description of Artificial Sequence: Synthetic oligonucleotide"
  source: /note="Description of Combined DNA/RNA Molecule: Synthetic oligonucleotide"
uagugaguuauuuugucaatt

SEQ ID NO: 2471 - DNA, 21 bp, Artificial Sequence
  source: /note="Description of Artificial Sequence: Synthetic oligonucleotide"
  source: /note="Description of Combined DNA/RNA Molecule: Synthetic oligonucleotide"
auagugaguuauuuugucatt

SEQ ID NO: 2472 - DNA, 21 bp, Artificial Sequence
  source: /note="Description of Artificial Sequence: Synthetic oligonucleotide"
  source: /note="Description of Combined DNA/RNA Molecule: Synthetic oligonucleotide"
uauagugaguuauuuuguctt

SEQ ID NO: 2473 - DNA, 21 bp, Artificial Sequence
  source: /note="Description of Artificial Sequence: Synthetic oligonucleotide"
  source: /note="Description of Combined DNA/RNA Molecule: Synthetic oligonucleotide"
aauuauagugaguuauuuutt

SEQ ID NO: 2474 - DNA, 21 bp, Artificial Sequence
  source: /note="Description of Artificial Sequence: Synthetic oligonucleotide"
  source: /note="Description of Combined DNA/RNA Molecule: Synthetic oligonucleotide"
uaauuauagugaguuauuutt

SEQ ID NO: 2475 - DNA, 21 bp, Artificial Sequence
  source: /note="Description of Artificial Sequence: Synthetic oligonucleotide"
  source: /note="Description of Combined DNA/RNA Molecule: Synthetic oligonucleotide"
guaauuauagugaguuauutt

SEQ ID NO: 2476 - DNA, 21 bp, Artificial Sequence
  source: /note="Description of Artificial Sequence: Synthetic oligonucleotide"
  source: /note="Description of Combined DNA/RNA Molecule: Synthetic oligonucleotide"
aguaauuauagugaguuautt

SEQ ID NO: 2477 - DNA, 21 bp, Artificial Sequence
  source: /note="Description of Artificial Sequence: Synthetic oligonucleotide"
  source: /note="Description of Combined DNA/RNA Molecule: Synthetic oligonucleotide"
caaguaauuauagugaguutt

SEQ ID NO: 2478 - DNA, 21 bp, Artificial Sequence
  source: /note="Description of Artificial Sequence: Synthetic oligonucleotide"
  source: /note="Description of Combined DNA/RNA Molecule: Synthetic oligonucleotide"
ucaaguaauuauagugagutt

SEQ ID NO: 2479 - DNA, 21 bp, Artificial Sequence
  source: /note="Description of Artificial Sequence: Synthetic oligonucleotide"
  source: /note="Description of Combined DNA/RNA Molecule: Synthetic oligonucleotide"
aucaaguaauuauagugagtt

SEQ ID NO: 2480 - DNA, 21 bp, Artificial Sequence
  source: /note="Description of Artificial Sequence: Synthetic oligonucleotide"
  source: /note="Description of Combined DNA/RNA Molecule: Synthetic oligonucleotide"
aaucaaguaauuauagugatt

SEQ ID NO: 2481 - DNA, 21 bp, Artificial Sequence
  source: /note="Description of Artificial Sequence: Synthetic oligonucleotide"
  source: /note="Description of Combined DNA/RNA Molecule: Synthetic oligonucleotide"
aaaaucaaguaauuauagutt

SEQ ID NO: 2482 - DNA, 21 bp, Artificial Sequence
  source: /note="Description of Artificial Sequence: Synthetic oligonucleotide"
  source: /note="Description of Combined DNA/RNA Molecule: Synthetic oligonucleotide"
uaaaaucaaguaauuauagtt

SEQ ID NO: 2483 - DNA, 21 bp, Artificial Sequence
  source: /note="Description of Artificial Sequence: Synthetic oligonucleotide"
  source: /note="Description of Combined DNA/RNA Molecule: Synthetic oligonucleotide"
auaaaaucaaguaauuauatt

SEQ ID NO: 2484 - DNA, 21 bp, Artificial Sequence
  source: /note="Description of Artificial Sequence: Synthetic oligonucleotide"
  source: /note="Description of Combined DNA/RNA Molecule: Synthetic oligonucleotide"
gauaaaaucaaguaauuautt

SEQ ID NO: 2485 - DNA, 21 bp, Artificial Sequence
  source: /note="Description of Artificial Sequence: Synthetic oligonucleotide"
  source: /note="Description of Combined DNA/RNA Molecule: Synthetic oligonucleotide"
ggauaaaaucaaguaauuatt

SEQ ID NO: 2486 - DNA, 21 bp, Artificial Sequence
  source: /note="Description of Artificial Sequence: Synthetic oligonucleotide"
  source: /note="Description of Combined DNA/RNA Molecule: Synthetic oligonucleotide"
uggauaaaaucaaguaauutt

SEQ ID NO: 2487 - DNA, 21 bp, Artificial Sequence
  source: /note="Description of Artificial Sequence: Synthetic oligonucleotide"
  source: /note="Description of Combined DNA/RNA Molecule: Synthetic oligonucleotide"
uuggauaaaaucaaguaautt

SEQ ID NO: 2488 - DNA, 21 bp, Artificial Sequence
  source: /note="Description of Artificial Sequence: Synthetic oligonucleotide"
  source: /note="Description of Combined DNA/RNA Molecule: Synthetic oligonucleotide"
uaauuuugcccuuggauaatt

SEQ ID NO: 2489 - DNA, 21 bp, Artificial Sequence
  source: /note="Description of Artificial Sequence: Synthetic oligonucleotide"
  source: /note="Description of Combined DNA/RNA Molecule: Synthetic oligonucleotide"
ccaaaguggauaauuuugctt

SEQ ID NO: 2490 - DNA, 21 bp, Artificial Sequence
  source: /note="Description of Artificial Sequence: Synthetic oligonucleotide"
  source: /note="Description of Combined DNA/RNA Molecule: Synthetic oligonucleotide"
ucucccucgugccaaagugtt

SEQ ID NO: 2491 - DNA, 21 bp, Artificial Sequence
  source: /note="Description of Artificial Sequence: Synthetic oligonucleotide"
  source: /note="Description of Combined DNA/RNA Molecule: Synthetic oligonucleotide"
ucugaaaauuucucccucgtt

SEQ ID NO: 2492 - DNA, 21 bp, Artificial Sequence
  source: /note="Description of Artificial Sequence: Synthetic oligonucleotide"
  source: /note="Description of Combined DNA/RNA Molecule: Synthetic oligonucleotide"
auaagaugcaucugaaaautt

SEQ ID NO: 2493 - DNA, 21 bp, Artificial Sequence
  source: /note="Description of Artificial Sequence: Synthetic oligonucleotide"
  source: /note="Description of Combined DNA/RNA Molecule: Synthetic oligonucleotide"
uuauacuuugauaagaugctt

SEQ ID NO: 2494 - DNA, 21 bp, Artificial Sequence
  source: /note="Description of Artificial Sequence: Synthetic oligonucleotide"
  source: /note="Description of Combined DNA/RNA Molecule: Synthetic oligonucleotide"
cuggaauguuuauacuuugtt

SEQ ID NO: 2495 - DNA, 21 bp, Artificial Sequence
  source: /note="Description of Artificial Sequence: Synthetic oligonucleotide"
  source: /note="Description of Combined DNA/RNA Molecule: Synthetic oligonucleotide"
uguucuguguuacuggaautt

SEQ ID NO: 2496 - DNA, 21 bp, Artificial Sequence
  source: /note="Description of Artificial Sequence: Synthetic oligonucleotide"
  source: /note="Description of Combined DNA/RNA Molecule: Synthetic oligonucleotide"
gaaggaaccauguucugugtt

SEQ ID NO: 2497 - DNA, 21 bp, Artificial Sequence
  source: /note="Description of Artificial Sequence: Synthetic oligonucleotide"
  source: /note="Description of Combined DNA/RNA Molecule: Synthetic oligonucleotide"
aagucgggaugaaggaacctt

SEQ ID NO: 2498 - DNA, 21 bp, Artificial Sequence
  source: /note="Description of Artificial Sequence: Synthetic oligonucleotide"
  source: /note="Description of Combined DNA/RNA Molecule: Synthetic oligonucleotide"
uaauagaccagaagucgggtt

SEQ ID NO: 2499 - DNA, 21 bp, Artificial Sequence
  source: /note="Description of Artificial Sequence: Synthetic oligonucleotide"
  source: /note="Description of Combined DNA/RNA Molecule: Synthetic oligonucleotide"
ugugacgauguaauagacctt

SEQ ID NO: 2500 - DNA, 21 bp, Artificial Sequence
  source: /note="Description of Artificial Sequence: Synthetic oligonucleotide"
  source: /note="Description of Combined DNA/RNA Molecule: Synthetic oligonucleotide"
ucuguucuccugugacgautt

SEQ ID NO: 2501 - DNA, 21 bp, Artificial Sequence
  source: /note="Description of Artificial Sequence: Synthetic oligonucleotide"
  source: /note="Description of Combined DNA/RNA Molecule: Synthetic oligonucleotide"
ucugcugucuguucuccugtt

SEQ ID NO: 2502 - DNA, 21 bp, Artificial Sequence
  source: /note="Description of Artificial Sequence: Synthetic oligonucleotide"
  source: /note="Description of Combined DNA/RNA Molecule: Synthetic oligonucleotide"
ucagacacuaauucugcugtt

SEQ ID NO: 2503 - DNA, 21 bp, Artificial Sequence
  source: /note="Description of Artificial Sequence: Synthetic oligonucleotide"
  source: /note="Description of Combined DNA/RNA Molecule: Synthetic oligonucleotide"
accagacugaaucagacactt

SEQ ID NO: 2504 - DNA, 21 bp, Artificial Sequence
  source: /note="Description of Artificial Sequence: Synthetic oligonucleotide"
  source: /note="Description of Combined DNA/RNA Molecule: Synthetic oligonucleotide"
ucaauauuuaaccagacugtt

SEQ ID NO: 2505 - DNA, 21 bp, Artificial Sequence
  source: /note="Description of Artificial Sequence: Synthetic oligonucleotide"
  source: /note="Description of Combined DNA/RNA Molecule: Synthetic oligonucleotide"
uuuuucuucaauauuuaactt

SEQ ID NO: 2506 - DNA, 21 bp, Artificial Sequence
  source: /note="Description of Artificial Sequence: Synthetic oligonucleotide"
  source: /note="Description of Combined DNA/RNA Molecule: Synthetic oligonucleotide"
cugguugccacauuuuucutt

SEQ ID NO: 2507 - DNA, 21 bp, Artificial Sequence
  source: /note="Description of Artificial Sequence: Synthetic oligonucleotide"
  source: /note="Description of Combined DNA/RNA Molecule: Synthetic oligonucleotide"
ugaaccuggagcugguugctt

SEQ ID NO: 2508 - DNA, 21 bp, Artificial Sequence
  source: /note="Description of Artificial Sequence: Synthetic oligonucleotide"
  source: /note="Description of Combined DNA/RNA Molecule: Synthetic oligonucleotide"
agacagaugaaccuggagctt

SEQ ID NO: 2509 - DNA, 21 bp, Artificial Sequence
  source: /note="Description of Artificial Sequence: Synthetic oligonucleotide"
  source: /note="Description of Combined DNA/RNA Molecule: Synthetic oligonucleotide"
ucugcaucaggagacagautt

SEQ ID NO: 2510 - DNA, 21 bp, Artificial Sequence
  source: /note="Description of Artificial Sequence: Synthetic oligonucleotide"
  source: /note="Description of Combined DNA/RNA Molecule: Synthetic oligonucleotide"
gagaauaugcaucugcauctt

SEQ ID NO: 2511 - DNA, 21 bp, Artificial Sequence
  source: /note="Description of Artificial Sequence: Synthetic oligonucleotide"
  source: /note="Description of Combined DNA/RNA Molecule: Synthetic oligonucleotide"
uuuggccuggagaauaugctt

SEQ ID NO: 2512 - DNA, 21 bp, Artificial Sequence
  source: /note="Description of Artificial Sequence: Synthetic oligonucleotide"
  source: /note="Description of Combined DNA/RNA Molecule: Synthetic oligonucleotide"
aagagacacaguuuggccutt

SEQ ID NO: 2513 - DNA, 21 bp, Artificial Sequence
  source: /note="Description of Artificial Sequence: Synthetic oligonucleotide"
  source: /note="Description of Combined DNA/RNA Molecule: Synthetic oligonucleotide"
uugccauauuaagagacactt

SEQ ID NO: 2514 - DNA, 21 bp, Artificial Sequence
  source: /note="Description of Artificial Sequence: Synthetic oligonucleotide"
  source: /note="Description of Combined DNA/RNA Molecule: Synthetic oligonucleotide"
auuccaguugccauauuaatt

SEQ ID NO: 2515 - DNA, 21 bp, Artificial Sequence
  source: /note="Description of Artificial Sequence: Synthetic oligonucleotide"
  source: /note="Description of Combined DNA/RNA Molecule: Synthetic oligonucleotide"
ccaggaauccauuccaguutt

SEQ ID NO: 2516 - DNA, 21 bp, Artificial Sequence
  source: /note="Description of Artificial Sequence: Synthetic oligonucleotide"
  source: /note="Description of Combined DNA/RNA Molecule: Synthetic oligonucleotide"
ugcuaaugccacccaggaatt

SEQ ID NO: 2517 - DNA, 21 bp, Artificial Sequence
  source: /note="Description of Artificial Sequence: Synthetic oligonucleotide"
  source: /note="Description of Combined DNA/RNA Molecule: Synthetic oligonucleotide"
guccacugcugcuaaugcctt

SEQ ID NO: 2518 - DNA, 21 bp, Artificial Sequence
  source: /note="Description of Artificial Sequence: Synthetic oligonucleotide"
  source: /note="Description of Combined DNA/RNA Molecule: Synthetic oligonucleotide"
auacacagcacuguccacutt

SEQ ID NO: 2519 - DNA, 21 bp, Artificial Sequence
  source: /note="Description of Artificial Sequence: Synthetic oligonucleotide"
  source: /note="Description of Combined DNA/RNA Molecule: Synthetic oligonucleotide"
uuuggacuccauacacagctt

SEQ ID NO: 2520 - DNA, 21 bp, Artificial Sequence
  source: /note="Description of Artificial Sequence: Synthetic oligonucleotide"
  source: /note="Description of Combined DNA/RNA Molecule: Synthetic oligonucleotide"
uuuggcuccucuuuggacutt

SEQ ID NO: 2521 - DNA, 21 bp, Artificial Sequence
  source: /note="Description of Artificial Sequence: Synthetic oligonucleotide"
  source: /note="Description of Combined DNA/RNA Molecule: Synthetic oligonucleotide"
agggcuuuuuggcuccucutt

SEQ ID NO: 2522 - DNA, 21 bp, Artificial Sequence
  source: /note="Description of Artificial Sequence: Synthetic oligonucleotide"
  source: /note="Description of Combined DNA/RNA Molecule: Synthetic oligonucleotide"
aauacucuuuccaagggcutt

SEQ ID NO: 2523 - DNA, 21 bp, Artificial Sequence
  source: /note="Description of Artificial Sequence: Synthetic oligonucleotide"
  source: /note="Description of Combined DNA/RNA Molecule: Synthetic oligonucleotide"
uaagaauugaaauacucuutt

SEQ ID NO: 2524 - DNA, 21 bp, Artificial Sequence
  source: /note="Description of Artificial Sequence: Synthetic oligonucleotide"
  source: /note="Description of Combined DNA/RNA Molecule: Synthetic oligonucleotide"
ucuucucuaagaauugaaatt

SEQ ID NO: 2525 - DNA, 21 bp, Artificial Sequence
  source: /note="Description of Artificial Sequence: Synthetic oligonucleotide"
  source: /note="Description of Combined DNA/RNA Molecule: Synthetic oligonucleotide"
agcccagaucacucuucuctt

SEQ ID NO: 2526 - DNA, 21 bp, Artificial Sequence
  source: /note="Description of Artificial Sequence: Synthetic oligonucleotide"
  source: /note="Description of Combined DNA/RNA Molecule: Synthetic oligonucleotide"
ugccccacagcccagaucatt

SEQ ID NO: 2527 - DNA, 21 bp, Artificial Sequence
  source: /note="Description of Artificial Sequence: Synthetic oligonucleotide"
  source: /note="Description of Combined DNA/RNA Molecule: Synthetic oligonucleotide"
ugaggccaccaccugcccctt

SEQ ID NO: 2528 - DNA, 21 bp, Artificial Sequence
  source: /note="Description of Artificial Sequence: Synthetic oligonucleotide"
  source: /note="Description of Combined DNA/RNA Molecule: Synthetic oligonucleotide"
uuggcauuguugaggccactt

SEQ ID NO: 2529 - DNA, 21 bp, Artificial Sequence
  source: /note="Description of Artificial Sequence: Synthetic oligonucleotide"
  source: /note="Description of Combined DNA/RNA Molecule: Synthetic oligonucleotide"
gaacacauuggcauuguugtt

SEQ ID NO: 2530 - DNA, 21 bp, Artificial Sequence
  source: /note="Description of Artificial Sequence: Synthetic oligonucleotide"
  source: /note="Description of Combined DNA/RNA Molecule: Synthetic oligonucleotide"
agcuagguggaacacauugtt

SEQ ID NO: 2531 - DNA, 21 bp, Artificial Sequence
  source: /note="Description of Artificial Sequence: Synthetic oligonucleotide"
  source: /note="Description of Combined DNA/RNA Molecule: Synthetic oligonucleotide"
agguaaguccagcuaggugtt

SEQ ID NO: 2532 - DNA, 21 bp, Artificial Sequence
  source: /note="Description of Artificial Sequence: Synthetic oligonucleotide"
  source: /note="Description of Combined DNA/RNA Molecule: Synthetic oligonucleotide"
uuagugaggaagguaaguctt

SEQ ID NO: 2533 - DNA, 21 bp, Artificial Sequence
  source: /note="Description of Artificial Sequence: Synthetic oligonucleotide"
  source: /note="Description of Combined DNA/RNA Molecule: Synthetic oligonucleotide"
ucugcauuugcauuagugatt

SEQ ID NO: 2534 - DNA, 21 bp, Artificial Sequence
  source: /note="Description of Artificial Sequence: Synthetic oligonucleotide"
  source: /note="Description of Combined DNA/RNA Molecule: Synthetic oligonucleotide"
uugggagucaucugcauuutt

SEQ ID NO: 2535 - DNA, 21 bp, Artificial Sequence
  source: /note="Description of Artificial Sequence: Synthetic oligonucleotide"
  source: /note="Description of Combined DNA/RNA Molecule: Synthetic oligonucleotide"
uucaucauuuucuugggagtt

SEQ ID NO: 2536 - DNA, 21 bp, Artificial Sequence
  source: /note="Description of Artificial Sequence: Synthetic oligonucleotide"
  source: /note="Description of Combined DNA/RNA Molecule: Synthetic oligonucleotide"
ugagaauuucuuuacaaggtt

SEQ ID NO: 2537 - DNA, 21 bp, Artificial Sequence
  source: /note="Description of Artificial Sequence: Synthetic oligonucleotide"
  source: /note="Description of Combined DNA/RNA Molecule: Synthetic oligonucleotide"
ucuucuuggccugagaauutt

SEQ ID NO: 2538 - DNA, 21 bp, Artificial Sequence
  source: /note="Description of Artificial Sequence: Synthetic oligonucleotide"
  source: /note="Description of Combined DNA/RNA Molecule: Synthetic oligonucleotide"
uuugcagcguucuucuuggtt

SEQ ID NO: 2539 - DNA, 21 bp, Artificial Sequence
  source: /note="Description of Artificial Sequence: Synthetic oligonucleotide"
  source: /note="Description of Combined DNA/RNA Molecule: Synthetic oligonucleotide"
ucuaucuucuuuugcagcgtt

SEQ ID NO: 2540 - DNA, 21 bp, Artificial Sequence
  source: /note="Description of Artificial Sequence: Synthetic oligonucleotide"
  source: /note="Description of Combined DNA/RNA Molecule: Synthetic oligonucleotide"
uauuucuucuaucuucuuutt

SEQ ID NO: 2541 - DNA, 21 bp, Artificial Sequence
  source: /note="Description of Artificial Sequence: Synthetic oligonucleotide"
  source: /note="Description of Combined DNA/RNA Molecule: Synthetic oligonucleotide"
auauuuagcagcuauuucutt

SEQ ID NO: 2542 - DNA, 21 bp, Artificial Sequence
  source: /note="Description of Artificial Sequence: Synthetic oligonucleotide"
  source: /note="Description of Combined DNA/RNA Molecule: Synthetic oligonucleotide"
aauguuuauauuuagcagctt

SEQ ID NO: 2543 - DNA, 21 bp, Artificial Sequence
  source: /note="Description of Artificial Sequence: Synthetic oligonucleotide"
  source: /note="Description of Combined DNA/RNA Molecule: Synthetic oligonucleotide"
uuucuucacuacugaaugutt

SEQ ID NO: 2544 - DNA, 21 bp, Artificial Sequence
  source: /note="Description of Artificial Sequence: Synthetic oligonucleotide"
  source: /note="Description of Combined DNA/RNA Molecule: Synthetic oligonucleotide"
aacaacauuucuucacuactt

SEQ ID NO: 2545 - DNA, 21 bp, Artificial Sequence
  source: /note="Description of Artificial Sequence: Synthetic oligonucleotide"
  source: /note="Description of Combined DNA/RNA Molecule: Synthetic oligonucleotide"
cuccaucguaacaacauuutt

SEQ ID NO: 2546 - DNA, 21 bp, Artificial Sequence
  source: /note="Description of Artificial Sequence: Synthetic oligonucleotide"
  source: /note="Description of Combined DNA/RNA Molecule: Synthetic oligonucleotide"
auuaacgcaggcuccaucgtt

SEQ ID NO: 2547 - DNA, 21 bp, Artificial Sequence
  source: /note="Description of Artificial Sequence: Synthetic oligonucleotide"
  source: /note="Description of Combined DNA/RNA Molecule: Synthetic oligonucleotide"
gguuucaucauuauuaacgtt

SEQ ID NO: 2548 - DNA, 21 bp, Artificial Sequence
  source: /note="Description of Artificial Sequence: Synthetic oligonucleotide"
  source: /note="Description of Combined DNA/RNA Molecule: Synthetic oligonucleotide"
ugcucacagguuucaucautt

SEQ ID NO: 2549 - DNA, 21 bp, Artificial Sequence
  source: /note="Description of Artificial Sequence: Synthetic oligonucleotide"
  source: /note="Description of Combined DNA/RNA Molecule: Synthetic oligonucleotide"
ugcagcucgcugcucacagtt

SEQ ID NO: 2550 - DNA, 21 bp, Artificial Sequence
  source: /note="Description of Artificial Sequence: Synthetic oligonucleotide"
  source: /note="Description of Combined DNA/RNA Molecule: Synthetic oligonucleotide"
aacuaauccgugcagcucgtt

SEQ ID NO: 2551 - DNA, 21 bp, Artificial Sequence
  source: /note="Description of Artificial Sequence: Synthetic oligonucleotide"
  source: /note="Description of Combined DNA/RNA Molecule: Synthetic oligonucleotide"
cuuggcccuaaacuaaucctt

SEQ ID NO: 2552 - DNA, 21 bp, Artificial Sequence
  source: /note="Description of Artificial Sequence: Synthetic oligonucleotide"
  source: /note="Description of Combined DNA/RNA Molecule: Synthetic oligonucleotide"
cuuugaugcaucuuggccctt

SEQ ID NO: 2553 - DNA, 21 bp, Artificial Sequence
  source: /note="Description of Artificial Sequence: Synthetic oligonucleotide"
  source: /note="Description of Combined DNA/RNA Molecule: Synthetic oligonucleotide"
uucagugaaagcuuugaugtt

SEQ ID NO: 2554 - DNA, 21 bp, Artificial Sequence
  source: /note="Description of Artificial Sequence: Synthetic oligonucleotide"
  source: /note="Description of Combined DNA/RNA Molecule: Synthetic oligonucleotide"
cacaacauucagugaaagctt

SEQ ID NO: 2555 - DNA, 21 bp, Artificial Sequence
  source: /note="Description of Artificial Sequence: Synthetic oligonucleotide"
  source: /note="Description of Combined DNA/RNA Molecule: Synthetic oligonucleotide"
cuugcgacgacacaacauutt

SEQ ID NO: 2556 - DNA, 21 bp, Artificial Sequence
  source: /note="Description of Artificial Sequence: Synthetic oligonucleotide"
  source: /note="Description of Combined DNA/RNA Molecule: Synthetic oligonucleotide"
acggagcuggcuugcgacgtt

SEQ ID NO: 2557 - DNA, 21 bp, Artificial Sequence
  source: /note="Description of Artificial Sequence: Synthetic oligonucleotide"
  source: /note="Description of Combined DNA/RNA Molecule: Synthetic oligonucleotide"
agagauauuagcacggagctt

SEQ ID NO: 2558 - DNA, 21 bp, Artificial Sequence
  source: /note="Description of Artificial Sequence: Synthetic oligonucleotide"
  source: /note="Description of Combined DNA/RNA Molecule: Synthetic oligonucleotide"
ucuuuaugagagauauuagtt

SEQ ID NO: 2559 - DNA, 21 bp, Artificial Sequence
  source: /note="Description of Artificial Sequence: Synthetic oligonucleotide"
  source: /note="Description of Combined DNA/RNA Molecule: Synthetic oligonucleotide"
uucccaauugcaugucuuutt

SEQ ID NO: 2560 - DNA, 21 bp, Artificial Sequence
  source: /note="Description of Artificial Sequence: Synthetic oligonucleotide"
  source: /note="Description of Combined DNA/RNA Molecule: Synthetic oligonucleotide"
uguguagccuucccaauugtt

SEQ ID NO: 2561 - DNA, 21 bp, Artificial Sequence
  source: /note="Description of Artificial Sequence: Synthetic oligonucleotide"
  source: /note="Description of Combined DNA/RNA Molecule: Synthetic oligonucleotide"
cagggucuucauguguagctt

SEQ ID NO: 2562 - DNA, 21 bp, Artificial Sequence
  source: /note="Description of Artificial Sequence: Synthetic oligonucleotide"
  source: /note="Description of Combined DNA/RNA Molecule: Synthetic oligonucleotide"
ugguaacagggucuucaugtt

SEQ ID NO: 2563 - DNA, 21 bp, Artificial Sequence
  source: /note="Description of Artificial Sequence: Synthetic oligonucleotide"
  source: /note="Description of Combined DNA/RNA Molecule: Synthetic oligonucleotide"
ucuggcuugcuuacugguatt

SEQ ID NO: 2564 - DNA, 21 bp, Artificial Sequence
  source: /note="Description of Artificial Sequence: Synthetic oligonucleotide"
  source: /note="Description of Combined DNA/RNA Molecule: Synthetic oligonucleotide"
uccgaauuucuggcuugcutt

SEQ ID NO: 2565 - DNA, 21 bp, Artificial Sequence
  source: /note="Description of Artificial Sequence: Synthetic oligonucleotide"
  source: /note="Description of Combined DNA/RNA Molecule: Synthetic oligonucleotide"
aaaauaacuccgaauuucutt

SEQ ID NO: 2566 - DNA, 21 bp, Artificial Sequence
  source: /note="Description of Artificial Sequence: Synthetic oligonucleotide"
  source: /note="Description of Combined DNA/RNA Molecule: Synthetic oligonucleotide"
agcuuucuggaaaauaacutt

SEQ ID NO: 2567 - DNA, 21 bp, Artificial Sequence
  source: /note="Description of Artificial Sequence: Synthetic oligonucleotide"
  source: /note="Description of Combined DNA/RNA Molecule: Synthetic oligonucleotide"
ucccacaaccagcuuucugtt

SEQ ID NO: 2568 - DNA, 21 bp, Artificial Sequence
  source: /note="Description of Artificial Sequence: Synthetic oligonucleotide"
  source: /note="Description of Combined DNA/RNA Molecule: Synthetic oligonucleotide"
aacaagaugaacuucccactt

SEQ ID NO: 2569 - DNA, 21 bp, Artificial Sequence
  source: /note="Description of Artificial Sequence: Synthetic oligonucleotide"
  source: /note="Description of Combined DNA/RNA Molecule: Synthetic oligonucleotide"
ucuucugggaacaagaugatt

SEQ ID NO: 2570 - DNA, 21 bp, Artificial Sequence
  source: /note="Description of Artificial Sequence: Synthetic oligonucleotide"
  source: /note="Description of Combined DNA/RNA Molecule: Synthetic oligonucleotide"
ugcaacuguuuucuucuggtt

SEQ ID NO: 2571 - DNA, 21 bp, Artificial Sequence
  source: /note="Description of Artificial Sequence: Synthetic oligonucleotide"
  source: /note="Description of Combined DNA/RNA Molecule: Synthetic oligonucleotide"
guagggcaaacugcaacugtt

SEQ ID NO: 2572 - DNA, 21 bp, Artificial Sequence
  source: /note="Description of Artificial Sequence: Synthetic oligonucleotide"
  source: /note="Description of Combined DNA/RNA Molecule: Synthetic oligonucleotide"
aaucagguagggcaaacugtt

SEQ ID NO: 2573 - DNA, 21 bp, Artificial Sequence
  source: /note="Description of Artificial Sequence: Synthetic oligonucleotide"
  source: /note="Description of Combined DNA/RNA Molecule: Synthetic oligonucleotide"
aggugguuagagaaucaggtt

SEQ ID NO: 2574 - DNA, 21 bp, Artificial Sequence
  source: /note="Description of Artificial Sequence: Synthetic oligonucleotide"
  source: /note="Description of Combined DNA/RNA Molecule: Synthetic oligonucleotide"
cuugaauuucccagguggutt

SEQ ID NO: 2575 - DNA, 21 bp, Artificial Sequence
  source: /note="Description of Artificial Sequence: Synthetic oligonucleotide"
  source: /note="Description of Combined DNA/RNA Molecule: Synthetic oligonucleotide"
ugccaacgccuugaauuuctt

SEQ ID NO: 2576 - DNA, 21 bp, Artificial Sequence
  source: /note="Description of Artificial Sequence: Synthetic oligonucleotide"
  source: /note="Description of Combined DNA/RNA Molecule: Synthetic oligonucleotide"
aguguuugaaaugccaacgtt

SEQ ID NO: 2577 - DNA, 21 bp, Artificial Sequence
  source: /note="Description of Artificial Sequence: Synthetic oligonucleotide"
  source: /note="Description of Combined DNA/RNA Molecule: Synthetic oligonucleotide"
uauaccaguguuugaaaugtt

SEQ ID NO: 2578 - DNA, 21 bp, Artificial Sequence
  source: /note="Description of Artificial Sequence: Synthetic oligonucleotide"
  source: /note="Description of Combined DNA/RNA Molecule: Synthetic oligonucleotide"
guaucagcaacacauauactt

SEQ ID NO: 2579 - DNA, 21 bp, Artificial Sequence
  source: /note="Description of Artificial Sequence: Synthetic oligonucleotide"
  source: /note="Description of Combined DNA/RNA Molecule: Synthetic oligonucleotide"
ugccuugacaguaucagcatt

SEQ ID NO: 2580 - DNA, 21 bp, Artificial Sequence
  source: /note="Description of Artificial Sequence: Synthetic oligonucleotide"
  source: /note="Description of Combined DNA/RNA Molecule: Synthetic oligonucleotide"
aacaccuuugccuugacagtt

SEQ ID NO: 2581 - DNA, 21 bp, Artificial Sequence
  source: /note="Description of Artificial Sequence: Synthetic oligonucleotide"
  source: /note="Description of Combined DNA/RNA Molecule: Synthetic oligonucleotide"
aagacaucuuugaacaccutt

SEQ ID NO: 2582 - DNA, 21 bp, Artificial Sequence
  source: /note="Description of Artificial Sequence: Synthetic oligonucleotide"
  source: /note="Description of Combined DNA/RNA Molecule: Synthetic oligonucleotide"
uuccaggaagacaucuuugtt

SEQ ID NO: 2583 - DNA, 21 bp, Artificial Sequence
  source: /note="Description of Artificial Sequence: Synthetic oligonucleotide"
  source: /note="Description of Combined DNA/RNA Molecule: Synthetic oligonucleotide"
uauauucauuuccaggaagtt

SEQ ID NO: 2584 - DNA, 21 bp, Artificial Sequence
  source: /note="Description of Artificial Sequence: Synthetic oligonucleotide"
  source: /note="Description of Combined DNA/RNA Molecule: Synthetic oligonucleotide"
aacagaauaugguauauuctt

SEQ ID NO: 2585 - DNA, 21 bp, Artificial Sequence
  source: /note="Description of Artificial Sequence: Synthetic oligonucleotide"
  source: /note="Description of Combined DNA/RNA Molecule: Synthetic oligonucleotide"
uccucguacaacagaauautt

SEQ ID NO: 2586 - DNA, 21 bp, Artificial Sequence
  source: /note="Description of Artificial Sequence: Synthetic oligonucleotide"
  source: /note="Description of Combined DNA/RNA Molecule: Synthetic oligonucleotide"
auuggaucuguucuccucgtt

SEQ ID NO: 2587 - DNA, 21 bp, Artificial Sequence
  source: /note="Description of Artificial Sequence: Synthetic oligonucleotide"
  source: /note="Description of Combined DNA/RNA Molecule: Synthetic oligonucleotide"
cuuucaauuggaucuguuctt

SEQ ID NO: 2588 - DNA, 21 bp, Artificial Sequence
  source: /note="Description of Artificial Sequence: Synthetic oligonucleotide"
  source: /note="Description of Combined DNA/RNA Molecule: Synthetic oligonucleotide"
guuguaaacaguuccuuuctt

SEQ ID NO: 2589 - DNA, 21 bp, Artificial Sequence
  source: /note="Description of Artificial Sequence: Synthetic oligonucleotide"
  source: /note="Description of Combined DNA/RNA Molecule: Synthetic oligonucleotide"
uccuauaguuguaaacagutt

SEQ ID NO: 2590 - DNA, 21 bp, Artificial Sequence
  source: /note="Description of Artificial Sequence: Synthetic oligonucleotide"
  source: /note="Description of Combined DNA/RNA Molecule: Synthetic oligonucleotide"
ucccagaaguccuauaguutt

SEQ ID NO: 2591 - DNA, 21 bp, Artificial Sequence
  source: /note="Description of Artificial Sequence: Synthetic oligonucleotide"
  source: /note="Description of Combined DNA/RNA Molecule: Synthetic oligonucleotide"
aacacagaacugcaucccatt

SEQ ID NO: 2592 - DNA, 21 bp, Artificial Sequence
  source: /note="Description of Artificial Sequence: Synthetic oligonucleotide"
  source: /note="Description of Combined DNA/RNA Molecule: Synthetic oligonucleotide"
agacauuuuaacacagaactt

SEQ ID NO: 2593 - DNA, 21 bp, Artificial Sequence
  source: /note="Description of Artificial Sequence: Synthetic oligonucleotide"
  source: /note="Description of Combined DNA/RNA Molecule: Synthetic oligonucleotide"
uccacagcagacauuuuaatt

SEQ ID NO: 2594 - DNA, 21 bp, Artificial Sequence
  source: /note="Description of Artificial Sequence: Synthetic oligonucleotide"
  source: /note="Description of Combined DNA/RNA Molecule: Synthetic oligonucleotide"
gugcagauucccuccacagtt

SEQ ID NO: 2595 - DNA, 21 bp, Artificial Sequence
  source: /note="Description of Artificial Sequence: Synthetic oligonucleotide"
  source: /note="Description of Combined DNA/RNA Molecule: Synthetic oligonucleotide"
uuuccgaagugcagauucctt

SEQ ID NO: 2596 - DNA, 21 bp, Artificial Sequence
  source: /note="Description of Artificial Sequence: Synthetic oligonucleotide"
  source: /note="Description of Combined DNA/RNA Molecule: Synthetic oligonucleotide"
ucaaugacugggcuuuccgtt

SEQ ID NO: 2597 - DNA, 21 bp, Artificial Sequence
  source: /note="Description of Artificial Sequence: Synthetic oligonucleotide"
  source: /note="Description of Combined DNA/RNA Molecule: Synthetic oligonucleotide"
ccugaugaucaaugacuggtt

SEQ ID NO: 2598 - DNA, 21 bp, Artificial Sequence
  source: /note="Description of Artificial Sequence: Synthetic oligonucleotide"
  source: /note="Description of Combined DNA/RNA Molecule: Synthetic oligonucleotide"
aggacuuugugcccugaugtt

SEQ ID NO: 2599 - DNA, 21 bp, Artificial Sequence
  source: /note="Description of Artificial Sequence: Synthetic oligonucleotide"
  source: /note="Description of Combined DNA/RNA Molecule: Synthetic oligonucleotide"
auuuggaggacuuugugcctt

SEQ ID NO: 2600 - DNA, 21 bp, Artificial Sequence
  source: /note="Description of Artificial Sequence: Synthetic oligonucleotide"
  source: /note="Description of Combined DNA/RNA Molecule: Synthetic oligonucleotide"
uuucuggcgcacacauuugtt

SEQ ID NO: 2601 - DNA, 21 bp, Artificial Sequence
  source: /note="Description of Artificial Sequence: Synthetic oligonucleotide"
  source: /note="Description of Combined DNA/RNA Molecule: Synthetic oligonucleotide"
gcccucuacuuucuggcgctt

SEQ ID NO: 2602 - DNA, 21 bp, Artificial Sequence
  source: /note="Description of Artificial Sequence: Synthetic oligonucleotide"
  source: /note="Description of Combined DNA/RNA Molecule: Synthetic oligonucleotide"
acuggaggagcccucuacutt

SEQ ID NO: 2603 - DNA, 21 bp, Artificial Sequence
  source: /note="Description of Artificial Sequence: Synthetic oligonucleotide"
  source: /note="Description of Combined DNA/RNA Molecule: Synthetic oligonucleotide"
gucaccaagugacuggaggtt

SEQ ID NO: 2604 - DNA, 21 bp, Artificial Sequence
  source: /note="Description of Artificial Sequence: Synthetic oligonucleotide"
  source: /note="Description of Combined DNA/RNA Molecule: Synthetic oligonucleotide"
agugaaugucaccaagugatt

SEQ ID NO: 2605 - DNA, 21 bp, Artificial Sequence
  source: /note="Description of Artificial Sequence: Synthetic oligonucleotide"
  source: /note="Description of Combined DNA/RNA Molecule: Synthetic oligonucleotide"
agaggaagcacagugaaugtt

SEQ ID NO: 2606 - DNA, 21 bp, Artificial Sequence
  source: /note="Description of Artificial Sequence: Synthetic oligonucleotide"
  source: /note="Description of Combined DNA/RNA Molecule: Synthetic oligonucleotide"
guugugaaggccaauuucctt

SEQ ID NO: 2607 - DNA, 21 bp, Artificial Sequence
  source: /note="Description of Artificial Sequence: Synthetic oligonucleotide"
  source: /note="Description of Combined DNA/RNA Molecule: Synthetic oligonucleotide"
aaaaauugauguugugaagtt

SEQ ID NO: 2608 - DNA, 21 bp, Artificial Sequence
  source: /note="Description of Artificial Sequence: Synthetic oligonucleotide"
  source: /note="Description of Combined DNA/RNA Molecule: Synthetic oligonucleotide"
aagucuccagugaaaaauutt

SEQ ID NO: 2609 - DNA, 21 bp, Artificial Sequence
  source: /note="Description of Artificial Sequence: Synthetic oligonucleotide"
  source: /note="Description of Combined DNA/RNA Molecule: Synthetic oligonucleotide"
uuccaaaccaagucuccagtt

SEQ ID NO: 2610 - DNA, 21 bp, Artificial Sequence
  source: /note="Description of Artificial Sequence: Synthetic oligonucleotide"
  source: /note="Description of Combined DNA/RNA Molecule: Synthetic oligonucleotide"
aagauuucuuuuccaaacctt

SEQ ID NO: 2611 - DNA, 21 bp, Artificial Sequence
  source: /note="Description of Artificial Sequence: Synthetic oligonucleotide"
  source: /note="Description of Combined DNA/RNA Molecule: Synthetic oligonucleotide"
uaauguuuuuacuaagauutt

SEQ ID NO: 2612 - DNA, 21 bp, Artificial Sequence
  source: /note="Description of Artificial Sequence: Synthetic oligonucleotide"
  source: /note="Description of Combined DNA/RNA Molecule: Synthetic oligonucleotide"
caccacucguaauguuuuutt

SEQ ID NO: 2613 - DNA, 21 bp, Artificial Sequence
  source: /note="Description of Artificial Sequence: Synthetic oligonucleotide"
  source: /note="Description of Combined DNA/RNA Molecule: Synthetic oligonucleotide"
acaccuucuggcaccacuctt

SEQ ID NO: 2614 - DNA, 21 bp, Artificial Sequence
  source: /note="Description of Artificial Sequence: Synthetic oligonucleotide"
  source: /note="Description of Combined DNA/RNA Molecule: Synthetic oligonucleotide"
uucccuuuugacaccuucutt

SEQ ID NO: 2615 - DNA, 21 bp, Artificial Sequence
  source: /note="Description of Artificial Sequence: Synthetic oligonucleotide"
  source: /note="Description of Combined DNA/RNA Molecule: Synthetic oligonucleotide"
auagcuuucccuuuugacatt

SEQ ID NO: 2616 - DNA, 21 bp, Artificial Sequence
  source: /note="Description of Artificial Sequence: Synthetic oligonucleotide"
  source: /note="Description of Combined DNA/RNA Molecule: Synthetic oligonucleotide"
aaaguaacaccagaauagctt

SEQ ID NO: 2617 - DNA, 21 bp, Artificial Sequence
  source: /note="Description of Artificial Sequence: Synthetic oligonucleotide"
  source: /note="Description of Combined DNA/RNA Molecule: Synthetic oligonucleotide"
cuaggauccaaaguaacactt

SEQ ID NO: 2618 - DNA, 21 bp, Artificial Sequence
  source: /note="Description of Artificial Sequence: Synthetic oligonucleotide"
  source: /note="Description of Combined DNA/RNA Molecule: Synthetic oligonucleotide"
auaaauaccccuaggaucctt

SEQ ID NO: 2619 - DNA, 21 bp, Artificial Sequence
  source: /note="Description of Artificial Sequence: Synthetic oligonucleotide"
  source: /note="Description of Combined DNA/RNA Molecule: Synthetic oligonucleotide"
uaaugguaccauaaauacctt

SEQ ID NO: 2620 - DNA, 21 bp, Artificial Sequence
  source: /note="Description of Artificial Sequence: Synthetic oligonucleotide"
  source: /note="Description of Combined DNA/RNA Molecule: Synthetic oligonucleotide"
uuucgucugcuaaugguactt

SEQ ID NO: 2621 - DNA, 21 bp, Artificial Sequence
  source: /note="Description of Artificial Sequence: Synthetic oligonucleotide"
  source: /note="Description of Combined DNA/RNA Molecule: Synthetic oligonucleotide"
ugggaacuccuuucgucugtt

SEQ ID NO: 2622 - DNA, 21 bp, Artificial Sequence
  source: /note="Description of Artificial Sequence: Synthetic oligonucleotide"
  source: /note="Description of Combined DNA/RNA Molecule: Synthetic oligonucleotide"
auccuguaugggaacuccutt

SEQ ID NO: 2623 - DNA, 21 bp, Artificial Sequence
  source: /note="Description of Artificial Sequence: Synthetic oligonucleotide"
  source: /note="Description of Combined DNA/RNA Molecule: Synthetic oligonucleotide"
ucuaaggguauccuguaugtt

SEQ ID NO: 2624 - DNA, 21 bp, Artificial Sequence
  source: /note="Description of Artificial Sequence: Synthetic oligonucleotide"
  source: /note="Description of Combined DNA/RNA Molecule: Synthetic oligonucleotide"
uuuggggaccaaaucuaagtt

SEQ ID NO: 2625 - DNA, 21 bp, Artificial Sequence
  source: /note="Description of Artificial Sequence: Synthetic oligonucleotide"
  source: /note="Description of Combined DNA/RNA Molecule: Synthetic oligonucleotide"
uugauuucuguuuuggggatt

SEQ ID NO: 2626 - DNA, 21 bp, Artificial Sequence
  source: /note="Description of Artificial Sequence: Synthetic oligonucleotide"
  source: /note="Description of Combined DNA/RNA Molecule: Synthetic oligonucleotide"
aaauccuuuugauuucugutt

SEQ ID NO: 2627 - DNA, 21 bp, Artificial Sequence
  source: /note="Description of Artificial Sequence: Synthetic oligonucleotide"
  source: /note="Description of Combined DNA/RNA Molecule: Synthetic oligonucleotide"
uuuacacucaaaauccuuutt

SEQ ID NO: 2628 - DNA, 21 bp, Artificial Sequence
  source: /note="Description of Artificial Sequence: Synthetic oligonucleotide"
  source: /note="Description of Combined DNA/RNA Molecule: Synthetic oligonucleotide"
caagcaguccuuuuacacutt

SEQ ID NO: 2629 - DNA, 21 bp, Artificial Sequence
  source: /note="Description of Artificial Sequence: Synthetic oligonucleotide"
  source: /note="Description of Combined DNA/RNA Molecule: Synthetic oligonucleotide"
ucaccuacaagcaguccuutt

SEQ ID NO: 2630 - DNA, 21 bp, Artificial Sequence
  source: /note="Description of Artificial Sequence: Synthetic oligonucleotide"
  source: /note="Description of Combined DNA/RNA Molecule: Synthetic oligonucleotide"
cagacaagaucucaccuactt

SEQ ID NO: 2631 - DNA, 21 bp, Artificial Sequence
  source: /note="Description of Artificial Sequence: Synthetic oligonucleotide"
  source: /note="Description of Combined DNA/RNA Molecule: Synthetic oligonucleotide"
uuagaacugcagacaagautt

SEQ ID NO: 2632 - DNA, 21 bp, Artificial Sequence
  source: /note="Description of Artificial Sequence: Synthetic oligonucleotide"
  source: /note="Description of Combined DNA/RNA Molecule: Synthetic oligonucleotide"
ugccuuccugacuuagaactt

SEQ ID NO: 2633 - DNA, 21 bp, Artificial Sequence
  source: /note="Description of Artificial Sequence: Synthetic oligonucleotide"
  source: /note="Description of Combined DNA/RNA Molecule: Synthetic oligonucleotide"
uuaggauauugaugccuuctt

SEQ ID NO: 2634 - DNA, 21 bp, Artificial Sequence
  source: /note="Description of Artificial Sequence: Synthetic oligonucleotide"
  source: /note="Description of Combined DNA/RNA Molecule: Synthetic oligonucleotide"
agguggguuaggauauugatt

SEQ ID NO: 2635 - DNA, 21 bp, Artificial Sequence
  source: /note="Description of Artificial Sequence: Synthetic oligonucleotide"
  source: /note="Description of Combined DNA/RNA Molecule: Synthetic oligonucleotide"
acucccuuuggggagguggtt

SEQ ID NO: 2636 - DNA, 21 bp, Artificial Sequence
  source: /note="Description of Artificial Sequence: Synthetic oligonucleotide"
  source: /note="Description of Combined DNA/RNA Molecule: Synthetic oligonucleotide"
cucugcacucccuuuggggtt

SEQ ID NO: 2637 - DNA, 21 bp, Artificial Sequence
  source: /note="Description of Artificial Sequence: Synthetic oligonucleotide"
  source: /note="Description of Combined DNA/RNA Molecule: Synthetic oligonucleotide"
aucagcuccgccucugcactt

SEQ ID NO: 2638 - DNA, 21 bp, Artificial Sequence
  source: /note="Description of Artificial Sequence: Synthetic oligonucleotide"
  source: /note="Description of Combined DNA/RNA Molecule: Synthetic oligonucleotide"
gacaacgcucaucagcucctt

SEQ ID NO: 2639 - DNA, 21 bp, Artificial Sequence
  source: /note="Description of Artificial Sequence: Synthetic oligonucleotide"
  source: /note="Description of Combined DNA/RNA Molecule: Synthetic oligonucleotide"
auagaauacugggacaacgtt

SEQ ID NO: 2640 - DNA, 21 bp, Artificial Sequence
  source: /note="Description of Artificial Sequence: Synthetic oligonucleotide"
  source: /note="Description of Combined DNA/RNA Molecule: Synthetic oligonucleotide"
gaaaaacauagaauacuggtt

SEQ ID NO: 2641 - DNA, 21 bp, Artificial Sequence
  source: /note="Description of Artificial Sequence: Synthetic oligonucleotide"
  source: /note="Description of Combined DNA/RNA Molecule: Synthetic oligonucleotide"
uuuccagguagugaaaaactt

SEQ ID NO: 2642 - DNA, 21 bp, Artificial Sequence
  source: /note="Description of Artificial Sequence: Synthetic oligonucleotide"
  source: /note="Description of Combined DNA/RNA Molecule: Synthetic oligonucleotide"
augauuuccuguuuccaggtt

SEQ ID NO: 2643 - DNA, 21 bp, Artificial Sequence
  source: /note="Description of Artificial Sequence: Synthetic oligonucleotide"
  source: /note="Description of Combined DNA/RNA Molecule: Synthetic oligonucleotide"
ucagaaugaaaaauguucctt

SEQ ID NO: 2644 - DNA, 21 bp, Artificial Sequence
  source: /note="Description of Artificial Sequence: Synthetic oligonucleotide"
  source: /note="Description of Combined DNA/RNA Molecule: Synthetic oligonucleotide"
caauuaaugggucagaaugtt

SEQ ID NO: 2645 - DNA, 21 bp, Artificial Sequence
  source: /note="Description of Artificial Sequence: Synthetic oligonucleotide"
  source: /note="Description of Combined DNA/RNA Molecule: Synthetic oligonucleotide"
ucugcuuuucaauuaauggtt

SEQ ID NO: 2646 - DNA, 21 bp, Artificial Sequence
  source: /note="Description of Artificial Sequence: Synthetic oligonucleotide"
  source: /note="Description of Combined DNA/RNA Molecule: Synthetic oligonucleotide"
uuucuucaguuucugcuuutt

SEQ ID NO: 2647 - DNA, 21 bp, Artificial Sequence
  source: /note="Description of Artificial Sequence: Synthetic oligonucleotide"
  source: /note="Description of Combined DNA/RNA Molecule: Synthetic oligonucleotide"
uuuaauuuuuucuucaguutt

SEQ ID NO: 2648 - DNA, 21 bp, Artificial Sequence
  source: /note="Description of Artificial Sequence: Synthetic oligonucleotide"
  source: /note="Description of Combined DNA/RNA Molecule: Synthetic oligonucleotide"
ucccuucuuuuaauuuuuutt

SEQ ID NO: 2649 - DNA, 21 bp, Artificial Sequence
  source: /note="Description of Artificial Sequence: Synthetic oligonucleotide"
  source: /note="Description of Combined DNA/RNA Molecule: Synthetic oligonucleotide"
cauaaugcucaacaucccutt

SEQ ID NO: 2650 - DNA, 21 bp, Artificial Sequence
  source: /note="Description of Artificial Sequence: Synthetic oligonucleotide"
  source: /note="Description of Combined DNA/RNA Molecule: Synthetic oligonucleotide"
ucuguaggacauaaugcuctt

SEQ ID NO: 2651 - DNA, 21 bp, Artificial Sequence
  source: /note="Description of Artificial Sequence: Synthetic oligonucleotide"
  source: /note="Description of Combined DNA/RNA Molecule: Synthetic oligonucleotide"
ucagcauuucuguaggacatt

SEQ ID NO: 2652 - DNA, 21 bp, Artificial Sequence
  source: /note="Description of Artificial Sequence: Synthetic oligonucleotide"
  source: /note="Description of Combined DNA/RNA Molecule: Synthetic oligonucleotide"
uguaagaguagucagcauutt

SEQ ID NO: 2653 - DNA, 21 bp, Artificial Sequence
  source: /note="Description of Artificial Sequence: Synthetic oligonucleotide"
  source: /note="Description of Combined DNA/RNA Molecule: Synthetic oligonucleotide"
uccacacacuguaagaguatt

SEQ ID NO: 2654 - DNA, 21 bp, Artificial Sequence
  source: /note="Description of Artificial Sequence: Synthetic oligonucleotide"
  source: /note="Description of Combined DNA/RNA Molecule: Synthetic oligonucleotide"
uuccacccuuccacacacutt

SEQ ID NO: 2655 - DNA, 21 bp, Artificial Sequence
  source: /note="Description of Artificial Sequence: Synthetic oligonucleotide"
  source: /note="Description of Combined DNA/RNA Molecule: Synthetic oligonucleotide"
agugcuagcacuuccaccctt

SEQ ID NO: 2656 - DNA, 21 bp, Artificial Sequence
  source: /note="Description of Artificial Sequence: Synthetic oligonucleotide"
  source: /note="Description of Combined DNA/RNA Molecule: Synthetic oligonucleotide"
cuguuaaccaagugcuagctt

SEQ ID NO: 2657 - DNA, 21 bp, Artificial Sequence
  source: /note="Description of Artificial Sequence: Synthetic oligonucleotide"
  source: /note="Description of Combined DNA/RNA Molecule: Synthetic oligonucleotide"
aaagcaaaagcuguuaacctt

SEQ ID NO: 2658 - DNA, 21 bp, Artificial Sequence
  source: /note="Description of Artificial Sequence: Synthetic oligonucleotide"
  source: /note="Description of Combined DNA/RNA Molecule: Synthetic oligonucleotide"
uccaaguacucuuaaagcatt

SEQ ID NO: 2659 - DNA, 21 bp, Artificial Sequence
  source: /note="Description of Artificial Sequence: Synthetic oligonucleotide"
  source: /note="Description of Combined DNA/RNA Molecule: Synthetic oligonucleotide"
uauuuacuuguccaaguactt

SEQ ID NO: 2660 - DNA, 21 bp, Artificial Sequence
  source: /note="Description of Artificial Sequence: Synthetic oligonucleotide"
  source: /note="Description of Combined DNA/RNA Molecule: Synthetic oligonucleotide"
cuacguauuuauuuacuugtt

SEQ ID NO: 2661 - DNA, 21 bp, Artificial Sequence
  source: /note="Description of Artificial Sequence: Synthetic oligonucleotide"
  source: /note="Description of Combined DNA/RNA Molecule: Synthetic oligonucleotide"
uucugcucuacguauuuautt

SEQ ID NO: 2662 - DNA, 21 bp, Artificial Sequence
  source: /note="Description of Artificial Sequence: Synthetic oligonucleotide"
  source: /note="Description of Combined DNA/RNA Molecule: Synthetic oligonucleotide"
uugaauuuugguucugcuctt

SEQ ID NO: 2663 - DNA, 21 bp, Artificial Sequence
  source: /note="Description of Artificial Sequence: Synthetic oligonucleotide"
  source: /note="Description of Combined DNA/RNA Molecule: Synthetic oligonucleotide"
aagaauuacaaauugaauutt

SEQ ID NO: 2664 - DNA, 21 bp, Artificial Sequence
  source: /note="Description of Artificial Sequence: Synthetic oligonucleotide"
  source: /note="Description of Combined DNA/RNA Molecule: Synthetic oligonucleotide"
agccacaauaaagaauuactt

SEQ ID NO: 2665 - DNA, 21 bp, Artificial Sequence
  source: /note="Description of Artificial Sequence: Synthetic oligonucleotide"
  source: /note="Description of Combined DNA/RNA Molecule: Synthetic oligonucleotide"
auucucaacuagccacaautt

SEQ ID NO: 2666 - DNA, 21 bp, Artificial Sequence
  source: /note="Description of Artificial Sequence: Synthetic oligonucleotide"
  source: /note="Description of Combined DNA/RNA Molecule: Synthetic oligonucleotide"
auugauaauucucaacuagtt

SEQ ID NO: 2667 - DNA, 21 bp, Artificial Sequence
  source: /note="Description of Artificial Sequence: Synthetic oligonucleotide"
  source: /note="Description of Combined DNA/RNA Molecule: Synthetic oligonucleotide"
uccauuaucuaauugauaatt

SEQ ID NO: 2668 - DNA, 21 bp, Artificial Sequence
  source: /note="Description of Artificial Sequence: Synthetic oligonucleotide"
  source: /note="Description of Combined DNA/RNA Molecule: Synthetic oligonucleotide"
uuuccuugaaagauccauutt

SEQ ID NO: 2669 - DNA, 21 bp, Artificial Sequence
  source: /note="Description of Artificial Sequence: Synthetic oligonucleotide"
  source: /note="Description of Combined DNA/RNA Molecule: Synthetic oligonucleotide"
ugugaauuuuccuugaaagtt

SEQ ID NO: 2670 - DNA, 21 bp, Artificial Sequence
  source: /note="Description of Artificial Sequence: Synthetic oligonucleotide"
  source: /note="Description of Combined DNA/RNA Molecule: Synthetic oligonucleotide"
uugguugauacugugaauutt

SEQ ID NO: 2671 - DNA, 21 bp, Artificial Sequence
  source: /note="Description of Artificial Sequence: Synthetic oligonucleotide"
  source: /note="Description of Combined DNA/RNA Molecule: Synthetic oligonucleotide"
uaauuuuauugguugauactt

SEQ ID NO: 2672 - DNA, 21 bp, Artificial Sequence
  source: /note="Description of Artificial Sequence: Synthetic oligonucleotide"
  source: /note="Description of Combined DNA/RNA Molecule: Synthetic oligonucleotide"
caagguacccuguaauuuutt

SEQ ID NO: 2673 - DNA, 21 bp, Artificial Sequence
  source: /note="Description of Artificial Sequence: Synthetic oligonucleotide"
  source: /note="Description of Combined DNA/RNA Molecule: Synthetic oligonucleotide"
ucaacaggcaagguacccutt

SEQ ID NO: 2674 - DNA, 21 bp, Artificial Sequence
  source: /note="Description of Artificial Sequence: Synthetic oligonucleotide"
  source: /note="Description of Combined DNA/RNA Molecule: Synthetic oligonucleotide"
uguucucucgggcuucaactt

SEQ ID NO: 2675 - DNA, 21 bp, Artificial Sequence
  source: /note="Description of Artificial Sequence: Synthetic oligonucleotide"
  source: /note="Description of Combined DNA/RNA Molecule: Synthetic oligonucleotide"
auauaagcuguucucucggtt

SEQ ID NO: 2676 - DNA, 21 bp, Artificial Sequence
  source: /note="Description of Artificial Sequence: Synthetic oligonucleotide"
  source: /note="Description of Combined DNA/RNA Molecule: Synthetic oligonucleotide"
aaggcuguaagauauaagctt

SEQ ID NO: 2677 - DNA, 21 bp, Artificial Sequence
  source: /note="Description of Artificial Sequence: Synthetic oligonucleotide"
  source: /note="Description of Combined DNA/RNA Molecule: Synthetic oligonucleotide"
ucacaguaaaggcuguaagtt

SEQ ID NO: 2678 - DNA, 21 bp, Artificial Sequence
  source: /note="Description of Artificial Sequence: Synthetic oligonucleotide"
  source: /note="Description of Combined DNA/RNA Molecule: Synthetic oligonucleotide"
ucgaaagccuuucuaauuctt

SEQ ID NO: 2679 - DNA, 21 bp, Artificial Sequence
  source: /note="Description of Artificial Sequence: Synthetic oligonucleotide"
  source: /note="Description of Combined DNA/RNA Molecule: Synthetic oligonucleotide"
ggggcauauaucgaaagcctt

SEQ ID NO: 2680 - DNA, 21 bp, Artificial Sequence
  source: /note="Description of Artificial Sequence: Synthetic oligonucleotide"
  source: /note="Description of Combined DNA/RNA Molecule: Synthetic oligonucleotide"
ucaccagggggcauauauctt

SEQ ID NO: 2681 - DNA, 21 bp, Artificial Sequence
  source: /note="Description of Artificial Sequence: Synthetic oligonucleotide"
  source: /note="Description of Combined DNA/RNA Molecule: Synthetic oligonucleotide"
agcugugucgauuuucacctt

SEQ ID NO: 2682 - DNA, 21 bp, Artificial Sequence
  source: /note="Description of Artificial Sequence: Synthetic oligonucleotide"
  source: /note="Description of Combined DNA/RNA Molecule: Synthetic oligonucleotide"
uuuaauuagagcugugucgtt

SEQ ID NO: 2683 - DNA, 21 bp, Artificial Sequence
  source: /note="Description of Artificial Sequence: Synthetic oligonucleotide"
  source: /note="Description of Combined DNA/RNA Molecule: Synthetic oligonucleotide"
ugucagcuuuaauuagagctt

SEQ ID NO: 2684 - DNA, 21 bp, Artificial Sequence
  source: /note="Description of Artificial Sequence: Synthetic oligonucleotide"
  source: /note="Description of Combined DNA/RNA Molecule: Synthetic oligonucleotide"
ucaagcagaaaguugucagtt

SEQ ID NO: 2685 - DNA, 21 bp, Artificial Sequence
  source: /note="Description of Artificial Sequence: Synthetic oligonucleotide"
  source: /note="Description of Combined DNA/RNA Molecule: Synthetic oligonucleotide"
uguauuuucaagcagaaagtt

SEQ ID NO: 2686 - DNA, 21 bp, Artificial Sequence
  source: /note="Description of Artificial Sequence: Synthetic oligonucleotide"
  source: /note="Description of Combined DNA/RNA Molecule: Synthetic oligonucleotide"
ugggcuggcaguguauuuutt

SEQ ID NO: 2687 - DNA, 21 bp, Artificial Sequence
  source: /note="Description of Artificial Sequence: Synthetic oligonucleotide"
  source: /note="Description of Combined DNA/RNA Molecule: Synthetic oligonucleotide"
uguaaaggugcucugggcutt

SEQ ID NO: 2688 - DNA, 21 bp, Artificial Sequence
  source: /note="Description of Artificial Sequence: Synthetic oligonucleotide"
  source: /note="Description of Combined DNA/RNA Molecule: Synthetic oligonucleotide"
auggccaauguaaaggugctt

SEQ ID NO: 2689 - DNA, 21 bp, Artificial Sequence
  source: /note="Description of Artificial Sequence: Synthetic oligonucleotide"
  source: /note="Description of Combined DNA/RNA Molecule: Synthetic oligonucleotide"
acgcagaaauggccaaugutt

SEQ ID NO: 2690 - DNA, 21 bp, Artificial Sequence
  source: /note="Description of Artificial Sequence: Synthetic oligonucleotide"
  source: /note="Description of Combined DNA/RNA Molecule: Synthetic oligonucleotide"
agggaaagagcauacgcagtt

SEQ ID NO: 2691 - DNA, 21 bp, Artificial Sequence
  source: /note="Description of Artificial Sequence: Synthetic oligonucleotide"
  source: /note="Description of Combined DNA/RNA Molecule: Synthetic oligonucleotide"
uuuuaucucccagggaaagtt

SEQ ID NO: 2692 - DNA, 21 bp, Artificial Sequence
  source: /note="Description of Artificial Sequence: Synthetic oligonucleotide"
  source: /note="Description of Combined DNA/RNA Molecule: Synthetic oligonucleotide"
ugugggugaguuuuaucuctt

SEQ ID NO: 2693 - DNA, 21 bp, Artificial Sequence
  source: /note="Description of Artificial Sequence: Synthetic oligonucleotide"
  source: /note="Description of Combined DNA/RNA Molecule: Synthetic oligonucleotide"
aacgaaacugugggugagutt

SEQ ID NO: 2694 - DNA, 21 bp, Artificial Sequence
  source: /note="Description of Artificial Sequence: Synthetic oligonucleotide"
  source: /note="Description of Combined DNA/RNA Molecule: Synthetic oligonucleotide"
aaacaauugaacgaaacugtt

SEQ ID NO: 2695 - DNA, 21 bp, Artificial Sequence
  source: /note="Description of Artificial Sequence: Synthetic oligonucleotide"
  source: /note="Description of Combined DNA/RNA Molecule: Synthetic oligonucleotide"
uucaaagcugaaacaauugtt

SEQ ID NO: 2696 - DNA, 21 bp, Artificial Sequence
  source: /note="Description of Artificial Sequence: Synthetic oligonucleotide"
  source: /note="Description of Combined DNA/RNA Molecule: Synthetic oligonucleotide"
aaagcuucucucuucaaagtt

SEQ ID NO: 2697 - DNA, 21 bp, Artificial Sequence
  source: /note="Description of Artificial Sequence: Synthetic oligonucleotide"
  source: /note="Description of Combined DNA/RNA Molecule: Synthetic oligonucleotide"
uuuaaccaaagcuucucuctt

SEQ ID NO: 2698 - DNA, 21 bp, Artificial Sequence
  source: /note="Description of Artificial Sequence: Synthetic oligonucleotide"
  source: /note="Description of Combined DNA/RNA Molecule: Synthetic oligonucleotide"
uggguggauuaccuuuaactt

SEQ ID NO: 2699 - DNA, 21 bp, Artificial Sequence
  source: /note="Description of Artificial Sequence: Synthetic oligonucleotide"
  source: /note="Description of Combined DNA/RNA Molecule: Synthetic oligonucleotide"
aacgauaaauggguggauutt

SEQ ID NO: 2700 - DNA, 21 bp, Artificial Sequence
  source: /note="Description of Artificial Sequence: Synthetic oligonucleotide"
  source: /note="Description of Combined DNA/RNA Molecule: Synthetic oligonucleotide"
uuuccaaaaacgauaaaugtt

SEQ ID NO: 2701 - DNA, 21 bp, Artificial Sequence
  source: /note="Description of Artificial Sequence: Synthetic oligonucleotide"
  source: /note="Description of Combined DNA/RNA Molecule: Synthetic oligonucleotide"
ugaagauugucuuuccaaatt

SEQ ID NO: 2702 - DNA, 21 bp, Artificial Sequence
  source: /note="Description of Artificial Sequence: Synthetic oligonucleotide"
  source: /note="Description of Combined DNA/RNA Molecule: Synthetic oligonucleotide"
ugucuuuaugcugaagauutt

SEQ ID NO: 2703 - DNA, 21 bp, Artificial Sequence
  source: /note="Description of Artificial Sequence: Synthetic oligonucleotide"
  source: /note="Description of Combined DNA/RNA Molecule: Synthetic oligonucleotide"
accaguguuagguacagagtt

SEQ ID NO: 2704 - DNA, 21 bp, Artificial Sequence
  source: /note="Description of Artificial Sequence: Synthetic oligonucleotide"
  source: /note="Description of Combined DNA/RNA Molecule: Synthetic oligonucleotide"
auacgugccguaccagugutt

SEQ ID NO: 2705 - DNA, 21 bp, Artificial Sequence
  source: /note="Description of Artificial Sequence: Synthetic oligonucleotide"
  source: /note="Description of Combined DNA/RNA Molecule: Synthetic oligonucleotide"
uguuucuaccauacgugcctt

SEQ ID NO: 2706 - DNA, 21 bp, Artificial Sequence
  source: /note="Description of Artificial Sequence: Synthetic oligonucleotide"
  source: /note="Description of Combined DNA/RNA Molecule: Synthetic oligonucleotide"
auaggcaguuguuucuacctt

SEQ ID NO: 2707 - DNA, 21 bp, Artificial Sequence
  source: /note="Description of Artificial Sequence: Synthetic oligonucleotide"
  source: /note="Description of Combined DNA/RNA Molecule: Synthetic oligonucleotide"
aguaaagcauaggcaguugtt

SEQ ID NO: 2708 - DNA, 21 bp, Artificial Sequence
  source: /note="Description of Artificial Sequence: Synthetic oligonucleotide"
  source: /note="Description of Combined DNA/RNA Molecule: Synthetic oligonucleotide"
uucagacuggugaguaaagtt

SEQ ID NO: 2709 - DNA, 21 bp, Artificial Sequence
  source: /note="Description of Artificial Sequence: Synthetic oligonucleotide"
  source: /note="Description of Combined DNA/RNA Molecule: Synthetic oligonucleotide"
auaucuuucaaguucagactt

SEQ ID NO: 2710 - DNA, 21 bp, Artificial Sequence
  source: /note="Description of Artificial Sequence: Synthetic oligonucleotide"
  source: /note="Description of Combined DNA/RNA Molecule: Synthetic oligonucleotide"
uaauuuauaucuuucaagutt

SEQ ID NO: 2711 - DNA, 21 bp, Artificial Sequence
  source: /note="Description of Artificial Sequence: Synthetic oligonucleotide"
  source: /note="Description of Combined DNA/RNA Molecule: Synthetic oligonucleotide"
uggguuaacauaauuuauatt

SEQ ID NO: 2712 - DNA, 21 bp, Artificial Sequence
  source: /note="Description of Artificial Sequence: Synthetic oligonucleotide"
  source: /note="Description of Combined DNA/RNA Molecule: Synthetic oligonucleotide"
auuugaugacuggguuaactt

SEQ ID NO: 2713 - DNA, 21 bp, Artificial Sequence
  source: /note="Description of Artificial Sequence: Synthetic oligonucleotide"
  source: /note="Description of Combined DNA/RNA Molecule: Synthetic oligonucleotide"
ucugauagccauuugaugatt

SEQ ID NO: 2714 - DNA, 21 bp, Artificial Sequence
  source: /note="Description of Artificial Sequence: Synthetic oligonucleotide"
  source: /note="Description of Combined DNA/RNA Molecule: Synthetic oligonucleotide"
uaccucugcucuucugauatt

SEQ ID NO: 2715 - DNA, 21 bp, Artificial Sequence
  source: /note="Description of Artificial Sequence: Synthetic oligonucleotide"
  source: /note="Description of Combined DNA/RNA Molecule: Synthetic oligonucleotide"
aagccaccuccauaccucutt

SEQ ID NO: 2716 - DNA, 21 bp, Artificial Sequence
  source: /note="Description of Artificial Sequence: Synthetic oligonucleotide"
  source: /note="Description of Combined DNA/RNA Molecule: Synthetic oligonucleotide"
guugaauaaaagccaccuctt

SEQ ID NO: 2717 - DNA, 21 bp, Artificial Sequence
  source: /note="Description of Artificial Sequence: Synthetic oligonucleotide"
  source: /note="Description of Combined DNA/RNA Molecule: Synthetic oligonucleotide"
uuguguccuggguugaauatt

SEQ ID NO: 2718 - DNA, 21 bp, Artificial Sequence
  source: /note="Description of Artificial Sequence: Synthetic oligonucleotide"
  source: /note="Description of Combined DNA/RNA Molecule: Synthetic oligonucleotide"
auggcauugauuguguccutt

SEQ ID NO: 2719 - DNA, 21 bp, Artificial Sequence
  source: /note="Description of Artificial Sequence: Synthetic oligonucleotide"
  source: /note="Description of Combined DNA/RNA Molecule: Synthetic oligonucleotide"
cccucaauggcauugauugtt

SEQ ID NO: 2720 - DNA, 21 bp, Artificial Sequence
  source: /note="Description of Artificial Sequence: Synthetic oligonucleotide"
  source: /note="Description of Combined DNA/RNA Molecule: Synthetic oligonucleotide"
uuccgucaggcccucaaugtt

SEQ ID NO: 2721 - DNA, 21 bp, Artificial Sequence
  source: /note="Description of Artificial Sequence: Synthetic oligonucleotide"
  source: /note="Description of Combined DNA/RNA Molecule: Synthetic oligonucleotide"
ccaggagugaauauuccgutt

SEQ ID NO: 2722 - DNA, 21 bp, Artificial Sequence
  source: /note="Description of Artificial Sequence: Synthetic oligonucleotide"
  source: /note="Description of Combined DNA/RNA Molecule: Synthetic oligonucleotide"
uuguuuaaccaggagugaatt

SEQ ID NO: 2723 - DNA, 21 bp, Artificial Sequence
  source: /note="Description of Artificial Sequence: Synthetic oligonucleotide"
  source: /note="Description of Combined DNA/RNA Molecule: Synthetic oligonucleotide"
caagcggaguuguuuaacctt

SEQ ID NO: 2724 - DNA, 21 bp, Artificial Sequence
  source: /note="Description of Artificial Sequence: Synthetic oligonucleotide"
  source: /note="Description of Combined DNA/RNA Molecule: Synthetic oligonucleotide"
gauguccauacucaagcggtt

SEQ ID NO: 2725 - DNA, 21 bp, Artificial Sequence
  source: /note="Description of Artificial Sequence: Synthetic oligonucleotide"
  source: /note="Description of Combined DNA/RNA Molecule: Synthetic oligonucleotide"
guaagaaacaucgaugucctt

SEQ ID NO: 2726 - DNA, 21 bp, Artificial Sequence
  source: /note="Description of Artificial Sequence: Synthetic oligonucleotide"
  source: /note="Description of Combined DNA/RNA Molecule: Synthetic oligonucleotide"
augcuuguaagaaacaucgtt

SEQ ID NO: 2727 - DNA, 21 bp, Artificial Sequence
  source: /note="Description of Artificial Sequence: Synthetic oligonucleotide"
  source: /note="Description of Combined DNA/RNA Molecule: Synthetic oligonucleotide"
uaaggcaccuuuaugcuugtt

SEQ ID NO: 2728 - DNA, 21 bp, Artificial Sequence
  source: /note="Description of Artificial Sequence: Synthetic oligonucleotide"
  source: /note="Description of Combined DNA/RNA Molecule: Synthetic oligonucleotide"
uuauaauuauguaaggcactt

SEQ ID NO: 2729 - DNA, 21 bp, Artificial Sequence
  source: /note="Description of Artificial Sequence: Synthetic oligonucleotide"
  source: /note="Description of Combined DNA/RNA Molecule: Synthetic oligonucleotide"
ugucauuuuauaauuaugutt

SEQ ID NO: 2730 - DNA, 21 bp, Artificial Sequence
  source: /note="Description of Artificial Sequence: Synthetic oligonucleotide"
  source: /note="Description of Combined DNA/RNA Molecule: Synthetic oligonucleotide"
aauucuugucugucauuuutt

SEQ ID NO: 2731 - DNA, 21 bp, Artificial Sequence
  source: /note="Description of Artificial Sequence: Synthetic oligonucleotide"
  source: /note="Description of Combined DNA/RNA Molecule: Synthetic oligonucleotide"
ccucccaaggaaauucuugtt

SEQ ID NO: 2732 - DNA, 21 bp, Artificial Sequence
  source: /note="Description of Artificial Sequence: Synthetic oligonucleotide"
  source: /note="Description of Combined DNA/RNA Molecule: Synthetic oligonucleotide"
cucuacuggccucccaaggtt

SEQ ID NO: 2733 - DNA, 21 bp, Artificial Sequence
  source: /note="Description of Artificial Sequence: Synthetic oligonucleotide"
  source: /note="Description of Combined DNA/RNA Molecule: Synthetic oligonucleotide"
auugagaagcaccucuacutt

SEQ ID NO: 2734 - DNA, 21 bp, Artificial Sequence
  source: /note="Description of Artificial Sequence: Synthetic oligonucleotide"
  source: /note="Description of Combined DNA/RNA Molecule: Synthetic oligonucleotide"
ugaggucaucauugagaagtt

SEQ ID NO: 2735 - DNA, 21 bp, Artificial Sequence
  source: /note="Description of Artificial Sequence: Synthetic oligonucleotide"
  source: /note="Description of Combined DNA/RNA Molecule: Synthetic oligonucleotide"
uguacugacaaugaggucatt

SEQ ID NO: 2736 - DNA, 21 bp, Artificial Sequence
  source: /note="Description of Artificial Sequence: Synthetic oligonucleotide"
  source: /note="Description of Combined DNA/RNA Molecule: Synthetic oligonucleotide"
ugccaaauccuguacugactt

SEQ ID NO: 2737 - DNA, 21 bp, Artificial Sequence
  source: /note="Description of Artificial Sequence: Synthetic oligonucleotide"
  source: /note="Description of Combined DNA/RNA Molecule: Synthetic oligonucleotide"
caagccacugccaaauccutt

SEQ ID NO: 2738 - DNA, 21 bp, Artificial Sequence
  source: /note="Description of Artificial Sequence: Synthetic oligonucleotide"
  source: /note="Description of Combined DNA/RNA Molecule: Synthetic oligonucleotide"
auguacuguagccaagccatt

SEQ ID NO: 2739 - DNA, 21 bp, Artificial Sequence
  source: /note="Description of Artificial Sequence: Synthetic oligonucleotide"
  source: /note="Description of Combined DNA/RNA Molecule: Synthetic oligonucleotide"
uuguuacauguacuguagctt

SEQ ID NO: 2740 - DNA, 21 bp, Artificial Sequence
  source: /note="Description of Artificial Sequence: Synthetic oligonucleotide"
  source: /note="Description of Combined DNA/RNA Molecule: Synthetic oligonucleotide"
uuugugaacuacaguuguutt

SEQ ID NO: 2741 - DNA, 21 bp, Artificial Sequence
  source: /note="Description of Artificial Sequence: Synthetic oligonucleotide"
  source: /note="Description of Combined DNA/RNA Molecule: Synthetic oligonucleotide"
uacugguuuugugaacuactt

SEQ ID NO: 2742 - DNA, 21 bp, Artificial Sequence
  source: /note="Description of Artificial Sequence: Synthetic oligonucleotide"
  source: /note="Description of Combined DNA/RNA Molecule: Synthetic oligonucleotide"
uccucagagguacugguuutt

SEQ ID NO: 2743 - DNA, 21 bp, Artificial Sequence
  source: /note="Description of Artificial Sequence: Synthetic oligonucleotide"
  source: /note="Description of Combined DNA/RNA Molecule: Synthetic oligonucleotide"
aaagcugcaaacuuccucatt

SEQ ID NO: 2744 - DNA, 21 bp, Artificial Sequence
  source: /note="Description of Artificial Sequence: Synthetic oligonucleotide"
  source: /note="Description of Combined DNA/RNA Molecule: Synthetic oligonucleotide"
uuuucaaauaaaagcugcatt

SEQ ID NO: 2745 - DNA, 21 bp, Artificial Sequence
  source: /note="Description of Artificial Sequence: Synthetic oligonucleotide"
  source: /note="Description of Combined DNA/RNA Molecule: Synthetic oligonucleotide"
ugaguaucgauuuucaaautt

SEQ ID NO: 2746 - DNA, 21 bp, Artificial Sequence
  source: /note="Description of Artificial Sequence: Synthetic oligonucleotide"
  source: /note="Description of Combined DNA/RNA Molecule: Synthetic oligonucleotide"
uucaauauccugaguaucgtt

SEQ ID NO: 2747 - DNA, 21 bp, Artificial Sequence
  source: /note="Description of Artificial Sequence: Synthetic oligonucleotide"
  source: /note="Description of Combined DNA/RNA Molecule: Synthetic oligonucleotide"
gugggaugcuucaauaucctt

SEQ ID NO: 2748 - DNA, 21 bp, Artificial Sequence
  source: /note="Description of Artificial Sequence: Synthetic oligonucleotide"
  source: /note="Description of Combined DNA/RNA Molecule: Synthetic oligonucleotide"
cucuguagugggaugcuuctt

SEQ ID NO: 2749 - DNA, 21 bp, Artificial Sequence
  source: /note="Description of Artificial Sequence: Synthetic oligonucleotide"
  source: /note="Description of Combined DNA/RNA Molecule: Synthetic oligonucleotide"
uuuccguagccucuguagutt

SEQ ID NO: 2750 - DNA, 21 bp, Artificial Sequence
  source: /note="Description of Artificial Sequence: Synthetic oligonucleotide"
  source: /note="Description of Combined DNA/RNA Molecule: Synthetic oligonucleotide"
uuuguaaucagaguuuccgtt

SEQ ID NO: 2751 - DNA, 21 bp, Artificial Sequence
  source: /note="Description of Artificial Sequence: Synthetic oligonucleotide"
  source: /note="Description of Combined DNA/RNA Molecule: Synthetic oligonucleotide"
uacuaugcguuuguaaucatt

SEQ ID NO: 2752 - DNA, 21 bp, Artificial Sequence
  source: /note="Description of Artificial Sequence: Synthetic oligonucleotide"
  source: /note="Description of Combined DNA/RNA Molecule: Synthetic oligonucleotide"
cuggcacaugcuacuaugctt

SEQ ID NO: 2753 - DNA, 21 bp, Artificial Sequence
  source: /note="Description of Artificial Sequence: Synthetic oligonucleotide"
  source: /note="Description of Combined DNA/RNA Molecule: Synthetic oligonucleotide"
gcuuguagcuggcacaugctt

SEQ ID NO: 2754 - DNA, 21 bp, Artificial Sequence
  source: /note="Description of Artificial Sequence: Synthetic oligonucleotide"
  source: /note="Description of Combined DNA/RNA Molecule: Synthetic oligonucleotide"
uucccugcugggcuuguagtt

SEQ ID NO: 2755 - DNA, 21 bp, Artificial Sequence
  source: /note="Description of Artificial Sequence: Synthetic oligonucleotide"
  source: /note="Description of Combined DNA/RNA Molecule: Synthetic oligonucleotide"
ugaugauucuucccugcugtt

SEQ ID NO: 2756 - DNA, 21 bp, Artificial Sequence
  source: /note="Description of Artificial Sequence: Synthetic oligonucleotide"
  source: /note="Description of Combined DNA/RNA Molecule: Synthetic oligonucleotide"
aggauccagaugaugauuctt

SEQ ID NO: 2757 - DNA, 21 bp, Artificial Sequence
  source: /note="Description of Artificial Sequence: Synthetic oligonucleotide"
  source: /note="Description of Combined DNA/RNA Molecule: Synthetic oligonucleotide"
aucaccgcaugagaggauctt

SEQ ID NO: 2758 - DNA, 21 bp, Artificial Sequence
  source: /note="Description of Artificial Sequence: Synthetic oligonucleotide"
  source: /note="Description of Combined DNA/RNA Molecule: Synthetic oligonucleotide"
auguccaucaccgcaugagtt

SEQ ID NO: 2759 - DNA, 21 bp, Artificial Sequence
  source: /note="Description of Artificial Sequence: Synthetic oligonucleotide"
  source: /note="Description of Combined DNA/RNA Molecule: Synthetic oligonucleotide"
aggcaaggagauguccauctt

SEQ ID NO: 2760 - DNA, 21 bp, Artificial Sequence
  source: /note="Description of Artificial Sequence: Synthetic oligonucleotide"
  source: /note="Description of Combined DNA/RNA Molecule: Synthetic oligonucleotide"
acugauuccaguaggcaagtt

SEQ ID NO: 2761 - DNA, 21 bp, Artificial Sequence
  source: /note="Description of Artificial Sequence: Synthetic oligonucleotide"
  source: /note="Description of Combined DNA/RNA Molecule: Synthetic oligonucleotide"
ucuucauuugcacugauuctt

SEQ ID NO: 2762 - DNA, 21 bp, Artificial Sequence
  source: /note="Description of Artificial Sequence: Synthetic oligonucleotide"
  source: /note="Description of Combined DNA/RNA Molecule: Synthetic oligonucleotide"
uuuuaagucuucuucauuutt

SEQ ID NO: 2763 - DNA, 21 bp, Artificial Sequence
  source: /note="Description of Artificial Sequence: Synthetic oligonucleotide"
  source: /note="Description of Combined DNA/RNA Molecule: Synthetic oligonucleotide"
caagggcuuuuaagucuuctt

SEQ ID NO: 2764 - DNA, 21 bp, Artificial Sequence
  source: /note="Description of Artificial Sequence: Synthetic oligonucleotide"
  source: /note="Description of Combined DNA/RNA Molecule: Synthetic oligonucleotide"
auccaccccuuccacaaggtt

SEQ ID NO: 2765 - DNA, 21 bp, Artificial Sequence
  source: /note="Description of Artificial Sequence: Synthetic oligonucleotide"
  source: /note="Description of Combined DNA/RNA Molecule: Synthetic oligonucleotide"
auaguugauccaccccuuctt

SEQ ID NO: 2766 - DNA, 21 bp, Artificial Sequence
  source: /note="Description of Artificial Sequence: Synthetic oligonucleotide"
  source: /note="Description of Combined DNA/RNA Molecule: Synthetic oligonucleotide"
uaaucagugaauaguugautt

SEQ ID NO: 2767 - DNA, 21 bp, Artificial Sequence
  source: /note="Description of Artificial Sequence: Synthetic oligonucleotide"
  source: /note="Description of Combined DNA/RNA Molecule: Synthetic oligonucleotide"
uuugauuugguaaucagugtt

SEQ ID NO: 2768 - DNA, 21 bp, Artificial Sequence
  source: /note="Description of Artificial Sequence: Synthetic oligonucleotide"
  source: /note="Description of Combined DNA/RNA Molecule: Synthetic oligonucleotide"
uaacauguccaucuuugautt

SEQ ID NO: 2769 - DNA, 21 bp, Artificial Sequence
  source: /note="Description of Artificial Sequence: Synthetic oligonucleotide"
  source: /note="Description of Combined DNA/RNA Molecule: Synthetic oligonucleotide"
guugcagaauaacaugucctt

SEQ ID NO: 2770 - DNA, 21 bp, Artificial Sequence
  source: /note="Description of Artificial Sequence: Synthetic oligonucleotide"
  source: /note="Description of Combined DNA/RNA Molecule: Synthetic oligonucleotide"
aaucgaauucaguugcagatt

SEQ ID NO: 2771 - DNA, 21 bp, Artificial Sequence
  source: /note="Description of Artificial Sequence: Synthetic oligonucleotide"
  source: /note="Description of Combined DNA/RNA Molecule: Synthetic oligonucleotide"
acuggagggaaucgaauuctt

SEQ ID NO: 2772 - DNA, 21 bp, Artificial Sequence
  source: /note="Description of Artificial Sequence: Synthetic oligonucleotide"
  source: /note="Description of Combined DNA/RNA Molecule: Synthetic oligonucleotide"
aaaggaaaucacuggagggtt

SEQ ID NO: 2773 - DNA, 21 bp, Artificial Sequence
  source: /note="Description of Artificial Sequence: Synthetic oligonucleotide"
  source: /note="Description of Combined DNA/RNA Molecule: Synthetic oligonucleotide"
aucguacacaaaggaaauctt

SEQ ID NO: 2774 - DNA, 21 bp, Artificial Sequence
  source: /note="Description of Artificial Sequence: Synthetic oligonucleotide"
  source: /note="Description of Combined DNA/RNA Molecule: Synthetic oligonucleotide"
caaauauccggaaucguactt

SEQ ID NO: 2775 - DNA, 21 bp, Artificial Sequence
  source: /note="Description of Artificial Sequence: Synthetic oligonucleotide"
  source: /note="Description of Combined DNA/RNA Molecule: Synthetic oligonucleotide"
caaagaguucaaauauccgtt

SEQ ID NO: 2776 - DNA, 21 bp, Artificial Sequence
  source: /note="Description of Artificial Sequence: Synthetic oligonucleotide"
  source: /note="Description of Combined DNA/RNA Molecule: Synthetic oligonucleotide"
aaacccaacuucaaagagutt

SEQ ID NO: 2777 - DNA, 21 bp, Artificial Sequence
  source: /note="Description of Artificial Sequence: Synthetic oligonucleotide"
  source: /note="Description of Combined DNA/RNA Molecule: Synthetic oligonucleotide"
aggacugagaaacccaacutt

SEQ ID NO: 2778 - DNA, 21 bp, Artificial Sequence
  source: /note="Description of Artificial Sequence: Synthetic oligonucleotide"
  source: /note="Description of Combined DNA/RNA Molecule: Synthetic oligonucleotide"
aaaguggcaggacugagaatt

SEQ ID NO: 2779 - DNA, 21 bp, Artificial Sequence
  source: /note="Description of Artificial Sequence: Synthetic oligonucleotide"
  source: /note="Description of Combined DNA/RNA Molecule: Synthetic oligonucleotide"
uucguacacugugaaagugtt

SEQ ID NO: 2780 - DNA, 21 bp, Artificial Sequence
  source: /note="Description of Artificial Sequence: Synthetic oligonucleotide"
  source: /note="Description of Combined DNA/RNA Molecule: Synthetic oligonucleotide"
gugguauucguacacugugtt

SEQ ID NO: 2781 - DNA, 21 bp, Artificial Sequence
  source: /note="Description of Artificial Sequence: Synthetic oligonucleotide"
  source: /note="Description of Combined DNA/RNA Molecule: Synthetic oligonucleotide"
uguuuaucuggucuguggutt

SEQ ID NO: 2782 - DNA, 21 bp, Artificial Sequence
  source: /note="Description of Artificial Sequence: Synthetic oligonucleotide"
  source: /note="Description of Combined DNA/RNA Molecule: Synthetic oligonucleotide"
ugguacacuguuuaucuggtt

SEQ ID NO: 2783 - DNA, 21 bp, Artificial Sequence
  source: /note="Description of Artificial Sequence: Synthetic oligonucleotide"
  source: /note="Description of Combined DNA/RNA Molecule: Synthetic oligonucleotide"
uauaaaacaugguacacugtt

SEQ ID NO: 2784 - DNA, 21 bp, Artificial Sequence
  source: /note="Description of Artificial Sequence: Synthetic oligonucleotide"
  source: /note="Description of Combined DNA/RNA Molecule: Synthetic oligonucleotide"
auuggaagugcuauaaaactt

SEQ ID NO: 2785 - DNA, 21 bp, Artificial Sequence
  source: /note="Description of Artificial Sequence: Synthetic oligonucleotide"
  source: /note="Description of Combined DNA/RNA Molecule: Synthetic oligonucleotide"
ugaauuuugauauuggaagtt

SEQ ID NO: 2786 - DNA, 21 bp, Artificial Sequence
  source: /note="Description of Artificial Sequence: Synthetic oligonucleotide"
  source: /note="Description of Combined DNA/RNA Molecule: Synthetic oligonucleotide"
agacuuucugaauuuugautt

SEQ ID NO: 2787 - DNA, 21 bp, Artificial Sequence
  source: /note="Description of Artificial Sequence: Synthetic oligonucleotide"
  source: /note="Description of Combined DNA/RNA Molecule: Synthetic oligonucleotide"
ggcuccuucacagacuuuctt

SEQ ID NO: 2788 - DNA, 21 bp, Artificial Sequence
  source: /note="Description of Artificial Sequence: Synthetic oligonucleotide"
  source: /note="Description of Combined DNA/RNA Molecule: Synthetic oligonucleotide"
acuugcacgcggcuccuuctt

SEQ ID NO: 2789 - DNA, 21 bp, Artificial Sequence
  source: /note="Description of Artificial Sequence: Synthetic oligonucleotide"
  source: /note="Description of Combined DNA/RNA Molecule: Synthetic oligonucleotide"
gcuucuacacacuugcacgtt

SEQ ID NO: 2790 - DNA, 21 bp, Artificial Sequence
  source: /note="Description of Artificial Sequence: Synthetic oligonucleotide"
  source: /note="Description of Combined DNA/RNA Molecule: Synthetic oligonucleotide"
gcccacaaucagcuucuactt

SEQ ID NO: 2791 - DNA, 21 bp, Artificial Sequence
  source: /note="Description of Artificial Sequence: Synthetic oligonucleotide"
  source: /note="Description of Combined DNA/RNA Molecule: Synthetic oligonucleotide"
ugcauuugcccacaaucagtt

SEQ ID NO: 2792 - DNA, 21 bp, Artificial Sequence
  source: /note="Description of Artificial Sequence: Synthetic oligonucleotide"
  source: /note="Description of Combined DNA/RNA Molecule: Synthetic oligonucleotide"
caauucuuccugcauuugctt

SEQ ID NO: 2793 - DNA, 21 bp, Artificial Sequence
  source: /note="Description of Artificial Sequence: Synthetic oligonucleotide"
  source: /note="Description of Combined DNA/RNA Molecule: Synthetic oligonucleotide"
uugucagauccaauucuuctt

SEQ ID NO: 2794 - DNA, 21 bp, Artificial Sequence
  source: /note="Description of Artificial Sequence: Synthetic oligonucleotide"
  source: /note="Description of Combined DNA/RNA Molecule: Synthetic oligonucleotide"
ucucugcagagauugucagtt

SEQ ID NO: 2795 - DNA, 21 bp, Artificial Sequence
  source: /note="Description of Artificial Sequence: Synthetic oligonucleotide"
  source: /note="Description of Combined DNA/RNA Molecule: Synthetic oligonucleotide"
uuuguuuucuugucucugctt

SEQ ID NO: 2796 - DNA, 21 bp, Artificial Sequence
  source: /note="Description of Artificial Sequence: Synthetic oligonucleotide"
  source: /note="Description of Combined DNA/RNA Molecule: Synthetic oligonucleotide"
caugcuguuuguuuucuugtt

SEQ ID NO: 2797 - DNA, 21 bp, Artificial Sequence
  source: /note="Description of Artificial Sequence: Synthetic oligonucleotide"
  source: /note="Description of Combined DNA/RNA Molecule: Synthetic oligonucleotide"
ucucugguuuacaugcugutt

SEQ ID NO: 2798 - DNA, 21 bp, Artificial Sequence
  source: /note="Description of Artificial Sequence: Synthetic oligonucleotide"
  source: /note="Description of Combined DNA/RNA Molecule: Synthetic oligonucleotide"
aagcauaugcaaucucuggtt

SEQ ID NO: 2799 - DNA, 21 bp, Artificial Sequence
  source: /note="Description of Artificial Sequence: Synthetic oligonucleotide"
  source: /note="Description of Combined DNA/RNA Molecule: Synthetic oligonucleotide"
uaacuuuauaagcauaugctt

SEQ ID NO: 2800 - DNA, 21 bp, Artificial Sequence
  source: /note="Description of Artificial Sequence: Synthetic oligonucleotide"
  source: /note="Description of Combined DNA/RNA Molecule: Synthetic oligonucleotide"
ugugaugcuaacuuuauaatt

SEQ ID NO: 2801 - DNA, 21 bp, Artificial Sequence
  source: /note="Description of Artificial Sequence: Synthetic oligonucleotide"
  source: /note="Description of Combined DNA/RNA Molecule: Synthetic oligonucleotide"
uacagugauggaugugaugtt

SEQ ID NO: 2802 - DNA, 21 bp, Artificial Sequence
  source: /note="Description of Artificial Sequence: Synthetic oligonucleotide"
  source: /note="Description of Combined DNA/RNA Molecule: Synthetic oligonucleotide"
aaaacauuuucuacagugatt

SEQ ID NO: 2803 - DNA, 21 bp, Artificial Sequence
  source: /note="Description of Artificial Sequence: Synthetic oligonucleotide"
  source: /note="Description of Combined DNA/RNA Molecule: Synthetic oligonucleotide"
cuugacaaaaacauuuucutt

SEQ ID NO: 2804 - DNA, 21 bp, Artificial Sequence
  source: /note="Description of Artificial Sequence: Synthetic oligonucleotide"
  source: /note="Description of Combined DNA/RNA Molecule: Synthetic oligonucleotide"
uugccuuguacuugacaaatt

SEQ ID NO: 2805 - DNA, 21 bp, Artificial Sequence
  source: /note="Description of Artificial Sequence: Synthetic oligonucleotide"
  source: /note="Description of Combined DNA/RNA Molecule: Synthetic oligonucleotide"
auauccagaaggguugccutt

SEQ ID NO: 2806 - DNA, 21 bp, Artificial Sequence
  source: /note="Description of Artificial Sequence: Synthetic oligonucleotide"
  source: /note="Description of Combined DNA/RNA Molecule: Synthetic oligonucleotide"
uuuguagauauccagaaggtt

SEQ ID NO: 2807 - DNA, 21 bp, Artificial Sequence
  source: /note="Description of Artificial Sequence: Synthetic oligonucleotide"
  source: /note="Description of Combined DNA/RNA Molecule: Synthetic oligonucleotide"
uuccccaguuuuguagauatt

SEQ ID NO: 2808 - DNA, 21 bp, Artificial Sequence
  source: /note="Description of Artificial Sequence: Synthetic oligonucleotide"
  source: /note="Description of Combined DNA/RNA Molecule: Synthetic oligonucleotide"
ucagcaacagcuuccccagtt

SEQ ID NO: 2809 - DNA, 21 bp, Artificial Sequence
  source: /note="Description of Artificial Sequence: Synthetic oligonucleotide"
  source: /note="Description of Combined DNA/RNA Molecule: Synthetic oligonucleotide"
gagucuuucucagcaacagtt

SEQ ID NO: 2810 - DNA, 21 bp, Artificial Sequence
  source: /note="Description of Artificial Sequence: Synthetic oligonucleotide"
  source: /note="Description of Combined DNA/RNA Molecule: Synthetic oligonucleotide"
ugaagguaaucucagaguctt

SEQ ID NO: 2811 - DNA, 21 bp, Artificial Sequence
  source: /note="Description of Artificial Sequence: Synthetic oligonucleotide"
  source: /note="Description of Combined DNA/RNA Molecule: Synthetic oligonucleotide"
uuuuaaugaagguaaucuctt

SEQ ID NO: 2812 - DNA, 21 bp, Artificial Sequence
  source: /note="Description of Artificial Sequence: Synthetic oligonucleotide"
  source: /note="Description of Combined DNA/RNA Molecule: Synthetic oligonucleotide"
uacagguuaccuuuuuaautt

SEQ ID NO: 2813 - DNA, 21 bp, Artificial Sequence
  source: /note="Description of Artificial Sequence: Synthetic oligonucleotide"
  source: /note="Description of Combined DNA/RNA Molecule: Synthetic oligonucleotide"
ucagcguuaguacagguuatt

SEQ ID NO: 2814 - DNA, 21 bp, Artificial Sequence
  source: /note="Description of Artificial Sequence: Synthetic oligonucleotide"
  source: /note="Description of Combined DNA/RNA Molecule: Synthetic oligonucleotide"
uuuaccagcucagcguuagtt

SEQ ID NO: 2815 - DNA, 21 bp, Artificial Sequence
  source: /note="Description of Artificial Sequence: Synthetic oligonucleotide"
  source: /note="Description of Combined DNA/RNA Molecule: Synthetic oligonucleotide"
guacugucuuccuuuuacctt

SEQ ID NO: 2816 - DNA, 21 bp, Artificial Sequence
  source: /note="Description of Artificial Sequence: Synthetic oligonucleotide"
  source: /note="Description of Combined DNA/RNA Molecule: Synthetic oligonucleotide"
auaauuaaguacugucuuctt

SEQ ID NO: 2817 - DNA, 21 bp, Artificial Sequence
  source: /note="Description of Artificial Sequence: Synthetic oligonucleotide"
  source: /note="Description of Combined DNA/RNA Molecule: Synthetic oligonucleotide"
uucuuuacccauaauuaagtt

SEQ ID NO: 2818 - DNA, 21 bp, Artificial Sequence
  source: /note="Description of Artificial Sequence: Synthetic oligonucleotide"
  source: /note="Description of Combined DNA/RNA Molecule: Synthetic oligonucleotide"
uaucuggagggcuucuuuatt

SEQ ID NO: 2819 - DNA, 21 bp, Artificial Sequence
  source: /note="Description of Artificial Sequence: Synthetic oligonucleotide"
  source: /note="Description of Combined DNA/RNA Molecule: Synthetic oligonucleotide"
auuguauuuuaucuggaggtt

SEQ ID NO: 2820 - DNA, 21 bp, Artificial Sequence
  source: /note="Description of Artificial Sequence: Synthetic oligonucleotide"
  source: /note="Description of Combined DNA/RNA Molecule: Synthetic oligonucleotide"
ugaaacugaaauuguauuutt

SEQ ID NO: 2821 - DNA, 21 bp, Artificial Sequence
  source: /note="Description of Artificial Sequence: Synthetic oligonucleotide"
  source: /note="Description of Combined DNA/RNA Molecule: Synthetic oligonucleotide"
guagauguaccugaaacugtt

SEQ ID NO: 2822 - DNA, 21 bp, Artificial Sequence
  source: /note="Description of Artificial Sequence: Synthetic oligonucleotide"
  source: /note="Description of Combined DNA/RNA Molecule: Synthetic oligonucleotide"
ucuaaaggguagauguacctt

SEQ ID NO: 2823 - DNA, 21 bp, Artificial Sequence
  source: /note="Description of Artificial Sequence: Synthetic oligonucleotide"
  source: /note="Description of Combined DNA/RNA Molecule: Synthetic oligonucleotide"
aggucaaggaaucuaaaggtt

SEQ ID NO: 2824 - DNA, 21 bp, Artificial Sequence
  source: /note="Description of Artificial Sequence: Synthetic oligonucleotide"
  source: /note="Description of Combined DNA/RNA Molecule: Synthetic oligonucleotide"
uauucaauccaggucaaggtt

SEQ ID NO: 2825 - DNA, 21 bp, Artificial Sequence
  source: /note="Description of Artificial Sequence: Synthetic oligonucleotide"
  source: /note="Description of Combined DNA/RNA Molecule: Synthetic oligonucleotide"
cuaggccaguauucaaucctt

SEQ ID NO: 2826 - DNA, 21 bp, Artificial Sequence
  source: /note="Description of Artificial Sequence: Synthetic oligonucleotide"
  source: /note="Description of Combined DNA/RNA Molecule: Synthetic oligonucleotide"
uguugugucucuaggccagtt

SEQ ID NO: 2827 - DNA, 21 bp, Artificial Sequence
  source: /note="Description of Artificial Sequence: Synthetic oligonucleotide"
  source: /note="Description of Combined DNA/RNA Molecule: Synthetic oligonucleotide"
gaugaacauguugugucuctt

SEQ ID NO: 2828 - DNA, 21 bp, Artificial Sequence
  source: /note="Description of Artificial Sequence: Synthetic oligonucleotide"
  source: /note="Description of Combined DNA/RNA Molecule: Synthetic oligonucleotide"
aaugcuugacacgaugaactt

SEQ ID NO: 2829 - DNA, 21 bp, Artificial Sequence
  source: /note="Description of Artificial Sequence: Synthetic oligonucleotide"
  source: /note="Description of Combined DNA/RNA Molecule: Synthetic oligonucleotide"
uuagcuaaaaaugcuugactt

SEQ ID NO: 2830 - DNA, 21 bp, Artificial Sequence
  source: /note="Description of Artificial Sequence: Synthetic oligonucleotide"
  source: /note="Description of Combined DNA/RNA Molecule: Synthetic oligonucleotide"
aaauucaucuaaauuagcutt

SEQ ID NO: 2831 - DNA, 21 bp, Artificial Sequence
  source: /note="Description of Artificial Sequence: Synthetic oligonucleotide"
  source: /note="Description of Combined DNA/RNA Molecule: Synthetic oligonucleotide"
aucuucggcaaauucaucutt

SEQ ID NO: 2832 - DNA, 21 bp, Artificial Sequence
  source: /note="Description of Artificial Sequence: Synthetic oligonucleotide"
  source: /note="Description of Combined DNA/RNA Molecule: Synthetic oligonucleotide"
uuuaaaaagauaucuucggtt

SEQ ID NO: 2833 - DNA, 21 bp, Artificial Sequence
  source: /note="Description of Artificial Sequence: Synthetic oligonucleotide"
  source: /note="Description of Combined DNA/RNA Molecule: Synthetic oligonucleotide"
uuagcauccauuuaaaaagtt

SEQ ID NO: 2834 - DNA, 21 bp, Artificial Sequence
  source: /note="Description of Artificial Sequence: Synthetic oligonucleotide"
  source: /note="Description of Combined DNA/RNA Molecule: Synthetic oligonucleotide"
uucaggaauuuuagcaucctt

SEQ ID NO: 2835 - DNA, 21 bp, Artificial Sequence
  source: /note="Description of Artificial Sequence: Synthetic oligonucleotide"
  source: /note="Description of Combined DNA/RNA Molecule: Synthetic oligonucleotide"
cugaacuucaggaauuuuatt

SEQ ID NO: 2836 - DNA, 21 bp, Artificial Sequence
  source: /note="Description of Artificial Sequence: Synthetic oligonucleotide"
  source: /note="Description of Combined DNA/RNA Molecule: Synthetic oligonucleotide"
aacuguaugcagcugaacutt

SEQ ID NO: 2837 - DNA, 21 bp, Artificial Sequence
  source: /note="Description of Artificial Sequence: Synthetic oligonucleotide"
  source: /note="Description of Combined DNA/RNA Molecule: Synthetic oligonucleotide"
auaagugcaaacuguaugctt

SEQ ID NO: 2838 - DNA, 21 bp, Artificial Sequence
  source: /note="Description of Artificial Sequence: Synthetic oligonucleotide"
  source: /note="Description of Combined DNA/RNA Molecule: Synthetic oligonucleotide"
acaacaggaguccauaagutt

SEQ ID NO: 2839 - DNA, 21 bp, Artificial Sequence
  source: /note="Description of Artificial Sequence: Synthetic oligonucleotide"
  source: /note="Description of Combined DNA/RNA Molecule: Synthetic oligonucleotide"
acuucaacaacaggagucctt

SEQ ID NO: 2840 - DNA, 21 bp, Artificial Sequence
  source: /note="Description of Artificial Sequence: Synthetic oligonucleotide"
  source: /note="Description of Combined DNA/RNA Molecule: Synthetic oligonucleotide"
aaaaaaacgaacuucaacatt

SEQ ID NO: 2841 - DNA, 21 bp, Artificial Sequence
  source: /note="Description of Artificial Sequence: Synthetic oligonucleotide"
  source: /note="Description of Combined DNA/RNA Molecule: Synthetic oligonucleotide"
aaaagaagaaaacaaaaaatt

SEQ ID NO: 2842 - DNA, 21 bp, Artificial Sequence
  source: /note="Description of Artificial Sequence: Synthetic oligonucleotide"
  source: /note="Description of Combined DNA/RNA Molecule: Synthetic oligonucleotide"
aauguuuaaaaaaagaagatt

SEQ ID NO: 2843 - DNA, 21 bp, Artificial Sequence
  source: /note="Description of Artificial Sequence: Synthetic oligonucleotide"
  source: /note="Description of Combined DNA/RNA Molecule: Synthetic oligonucleotide"
agcuaugaauguuuaaaaatt

SEQ ID NO: 2844 - DNA, 21 bp, Artificial Sequence
  source: /note="Description of Artificial Sequence: Synthetic oligonucleotide"
  source: /note="Description of Combined DNA/RNA Molecule: Synthetic oligonucleotide"
uacaaauaagaccagcuautt

SEQ ID NO: 2845 - DNA, 21 bp, Artificial Sequence
  source: /note="Description of Artificial Sequence: Synthetic oligonucleotide"
  source: /note="Description of Combined DNA/RNA Molecule: Synthetic oligonucleotide"
ugagcuuuacaaauaagactt

SEQ ID NO: 2846 - DNA, 21 bp, Artificial Sequence
  source: /note="Description of Artificial Sequence: Synthetic oligonucleotide"
  source: /note="Description of Combined DNA/RNA Molecule: Synthetic oligonucleotide"
ucuaaguaaagugagcuuutt

SEQ ID NO: 2847 - DNA, 21 bp, Artificial Sequence
  source: /note="Description of Artificial Sequence: Synthetic oligonucleotide"
  source: /note="Description of Combined DNA/RNA Molecule: Synthetic oligonucleotide"
agugccacuaauucuaagutt

SEQ ID NO: 2848 - DNA, 21 bp, Artificial Sequence
  source: /note="Description of Artificial Sequence: Synthetic oligonucleotide"
  source: /note="Description of Combined DNA/RNA Molecule: Synthetic oligonucleotide"
aauaaaagcaagugccacutt

SEQ ID NO: 2849 - DNA, 21 bp, Artificial Sequence
  source: /note="Description of Artificial Sequence: Synthetic oligonucleotide"
  source: /note="Description of Combined DNA/RNA Molecule: Synthetic oligonucleotide"
aucauucucuaauaaaagctt

SEQ ID NO: 2850 - DNA, 21 bp, Artificial Sequence
  source: /note="Description of Artificial Sequence: Synthetic oligonucleotide"
  source: /note="Description of Combined DNA/RNA Molecule: Synthetic oligonucleotide"
agcauuugaaaucauucuctt

SEQ ID NO: 2851 - DNA, 21 bp, Artificial Sequence
  source: /note="Description of Artificial Sequence: Synthetic oligonucleotide"
  source: /note="Description of Combined DNA/RNA Molecule: Synthetic oligonucleotide"
aaaguuacagcauuugaaatt

SEQ ID NO: 2852 - DNA, 21 bp, Artificial Sequence
  source: /note="Description of Artificial Sequence: Synthetic oligonucleotide"
  source: /note="Description of Combined DNA/RNA Molecule: Synthetic oligonucleotide"
uguuauuucagaaaguuactt

SEQ ID NO: 2853 - DNA, 21 bp, Artificial Sequence
  source: /note="Description of Artificial Sequence: Synthetic oligonucleotide"
  source: /note="Description of Combined DNA/RNA Molecule: Synthetic oligonucleotide"
uccaaggccauguuauuuctt

SEQ ID NO: 2854 - DNA, 21 bp, Artificial Sequence
  source: /note="Description of Artificial Sequence: Synthetic oligonucleotide"
  source: /note="Description of Combined DNA/RNA Molecule: Synthetic oligonucleotide"
gucuucaugcccuccaaggtt

SEQ ID NO: 2855 - DNA, 21 bp, Artificial Sequence
  source: /note="Description of Artificial Sequence: Synthetic oligonucleotide"
  source: /note="Description of Combined DNA/RNA Molecule: Synthetic oligonucleotide"
guaucugucuucaugcccutt

SEQ ID NO: 2856 - DNA, 21 bp, Artificial Sequence
  source: /note="Description of Artificial Sequence: Synthetic oligonucleotide"
  source: /note="Description of Combined DNA/RNA Molecule: Synthetic oligonucleotide"
auaaccuuggaggaguauctt

SEQ ID NO: 2857 - DNA, 21 bp, Artificial Sequence
  source: /note="Description of Artificial Sequence: Synthetic oligonucleotide"
  source: /note="Description of Combined DNA/RNA Molecule: Synthetic oligonucleotide"
uguccaauaaccuuggaggtt

SEQ ID NO: 2858 - DNA, 21 bp, Artificial Sequence
  source: /note="Description of Artificial Sequence: Synthetic oligonucleotide"
  source: /note="Description of Combined DNA/RNA Molecule: Synthetic oligonucleotide"
uuuauuguuuccggugucctt

SEQ ID NO: 2859 - DNA, 21 bp, Artificial Sequence
  source: /note="Description of Artificial Sequence: Synthetic oligonucleotide"
  source: /note="Description of Combined DNA/RNA Molecule: Synthetic oligonucleotide"
uguuccaauuuauuguuuctt

SEQ ID NO: 2860 - DNA, 21 bp, Artificial Sequence
  source: /note="Description of Artificial Sequence: Synthetic oligonucleotide"
  source: /note="Description of Combined DNA/RNA Molecule: Synthetic oligonucleotide"
uuugaggagguguuccaautt

SEQ ID NO: 2861 - DNA, 21 bp, Artificial Sequence
  source: /note="Description of Artificial Sequence: Synthetic oligonucleotide"
  source: /note="Description of Combined DNA/RNA Molecule: Synthetic oligonucleotide"
ugagugguagguuugaggatt

SEQ ID NO: 2862 - DNA, 21 bp, Artificial Sequence
  source: /note="Description of Artificial Sequence: Synthetic oligonucleotide"
  source: /note="Description of Combined DNA/RNA Molecule: Synthetic oligonucleotide"
aaacauuccugagugguagtt

SEQ ID NO: 2863 - DNA, 21 bp, Artificial Sequence
  source: /note="Description of Artificial Sequence: Synthetic oligonucleotide"
  source: /note="Description of Combined DNA/RNA Molecule: Synthetic oligonucleotide"
uucggccccagcaaacauutt

SEQ ID NO: 2864 - DNA, 21 bp, Artificial Sequence
  source: /note="Description of Artificial Sequence: Synthetic oligonucleotide"
  source: /note="Description of Combined DNA/RNA Molecule: Synthetic oligonucleotide"
uguucuuucggccccagcatt

SEQ ID NO: 2865 - DNA, 21 bp, Artificial Sequence
  source: /note="Description of Artificial Sequence: Synthetic oligonucleotide"
  source: /note="Description of Combined DNA/RNA Molecule: Synthetic oligonucleotide"
uuucaauggacuguucuuutt

SEQ ID NO: 2866 - DNA, 21 bp, Artificial Sequence
  source: /note="Description of Artificial Sequence: Synthetic oligonucleotide"
  source: /note="Description of Combined DNA/RNA Molecule: Synthetic oligonucleotide"
guaauacucccuuucaaugtt

SEQ ID NO: 2867 - DNA, 21 bp, Artificial Sequence
  source: /note="Description of Artificial Sequence: Synthetic oligonucleotide"
  source: /note="Description of Combined DNA/RNA Molecule: Synthetic oligonucleotide"
cauguuuuuguaauacucctt

SEQ ID NO: 2868 - DNA, 21 bp, Artificial Sequence
  source: /note="Description of Artificial Sequence: Synthetic oligonucleotide"
  source: /note="Description of Combined DNA/RNA Molecule: Synthetic oligonucleotide"
caagcaaaggccauguuuutt

SEQ ID NO: 2869 - DNA, 21 bp, Artificial Sequence
  source: /note="Description of Artificial Sequence: Synthetic oligonucleotide"
  source: /note="Description of Combined DNA/RNA Molecule: Synthetic oligonucleotide"
uuuucuuucaagcaaaggctt

SEQ ID NO: 2870 - DNA, 21 bp, Artificial Sequence
  source: /note="Description of Artificial Sequence: Synthetic oligonucleotide"
  source: /note="Description of Combined DNA/RNA Molecule: Synthetic oligonucleotide"
uuccuugguauuuucuuuctt

SEQ ID NO: 2871 - DNA, 21 bp, Artificial Sequence
  source: /note="Description of Artificial Sequence: Synthetic oligonucleotide"
  source: /note="Description of Combined DNA/RNA Molecule: Synthetic oligonucleotide"
ucaguuuccuguuccuuggtt

SEQ ID NO: 2872 - DNA, 21 bp, Artificial Sequence
  source: /note="Description of Artificial Sequence: Synthetic oligonucleotide"
  source: /note="Description of Combined DNA/RNA Molecule: Synthetic oligonucleotide"
caggcuuuaaugaucaguutt

SEQ ID NO: 2873 - RNA, 21 nt, Artificial Sequence
  source: /note="Description of Artificial Sequence: Synthetic oligonucleotide"
aagcaagauauuuuuauaaua

SEQ ID NO: 2874 - RNA, 21 nt, Artificial Sequence
  source: /note="Description of Artificial Sequence: Synthetic oligonucleotide"
aagcaagauauuuuuauaaua

SEQ ID NO: 2875 - RNA, 21 nt, Artificial Sequence
  source: /note="Description of Artificial Sequence: Synthetic oligonucleotide"
aagcaagauauuuuuauaaua

SEQ ID NO: 2876 - RNA, 21 nt, Artificial Sequence
  source: /note="Description of Artificial Sequence: Synthetic oligonucleotide"
aagcaagauauuuuuauaaua

SEQ ID NO: 2877 - RNA, 21 nt, Artificial Sequence
  source: /note="Description of Artificial Sequence: Synthetic oligonucleotide"
aagcaagauauuuuuauaaua

SEQ ID NO: 2878 - RNA, 21 nt, Artificial Sequence
  source: /note="Description of Artificial Sequence: Synthetic oligonucleotide"
aagcaagauauuuuuauaaua

SEQ ID NO: 2879 - RNA, 21 nt, Artificial Sequence
  source: /note="Description of Artificial Sequence: Synthetic oligonucleotide"
aagcaagauauuuuuauaaua

SEQ ID NO: 2880 - DNA, 21 bp, Artificial Sequence
  source: /note="Description of Artificial Sequence: Synthetic oligonucleotide"
  source: /note="Description of Combined DNA/RNA Molecule: Synthetic oligonucleotide"
aagcaagauauuuuuataaua

SEQ ID NO: 2881 - DNA, 21 bp, Artificial Sequence
  source: /note="Description of Artificial Sequence: Synthetic oligonucleotide"
  source: /note="Description of Combined DNA/RNA Molecule: Synthetic oligonucleotide"
aagcaagauauuuuuataaua

SEQ ID NO: 2882 - DNA, 21 bp, Artificial Sequence
  source: /note="Description of Artificial Sequence: Synthetic oligonucleotide"
  source: /note="Description of Combined DNA/RNA Molecule: Synthetic oligonucleotide"
aagcaagauauuuuuataaua

SEQ ID NO: 2883 - RNA, 21 nt, Artificial Sequence
  source: /note="Description of Artificial Sequence: Synthetic oligonucleotide"
aagcaagauauuuuuauaaua

SEQ ID NO: 2884 - RNA, 21 nt, Artificial Sequence
  source: /note="Description of Artificial Sequence: Synthetic oligonucleotide"
aagcaagauauuuuuauaaua

SEQ ID NO: 2885 - RNA, 21 nt, Artificial Sequence
  source: /note="Description of Artificial Sequence: Synthetic oligonucleotide"
aagcaagauauuuuuauaaua

SEQ ID NO: 2886 - RNA, 23 nt, Artificial Sequence
  source: /note="Description of Artificial Sequence: Synthetic oligonucleotide"
uauuauaaaaauaucuugcuuuu

SEQ ID NO: 2887 - DNA, 25 bp, Artificial Sequence
  source: /note="Description of Artificial Sequence: Synthetic oligonucleotide"
  source: /note="Description of Combined DNA/RNA Molecule: Synthetic oligonucleotide"
uauuauaaaaauaucuugcuuuutt

SEQ ID NO: 2888 - DNA, 25 bp, Artificial Sequence
  source: /note="Description of Artificial Sequence: Synthetic oligonucleotide"
  source: /note="Description of Combined DNA/RNA Molecule: Synthetic oligonucleotide"
uauuauaaaaauaucuugcuuuutt

SEQ ID NO: 2889 - DNA, 25 bp, Artificial Sequence
  source: /note="Description of Artificial Sequence: Synthetic oligonucleotide"
  source: /note="Description of Combined DNA/RNA Molecule: Synthetic oligonucleotide"
uauuauaaaaauaucuugcuuuutt

SEQ ID NO: 2890 - DNA, 25 bp, Artificial Sequence
  source: /note="Description of Artificial Sequence: Synthetic oligonucleotide"
  source: /note="Description of Combined DNA/RNA Molecule: Synthetic oligonucleotide"
uauuauaaaaauaucuugcuuuutt

SEQ ID NO: 2891 - DNA, 25 bp, Artificial Sequence
  source: /note="Description of Artificial Sequence: Synthetic oligonucleotide"
  source: /note="Description of Combined DNA/RNA Molecule: Synthetic oligonucleotide"
uauuauaaaaauaucuugcuuuutt

SEQ ID NO: 2892 - DNA, 25 bp, Artificial Sequence
  source: /note="Description of Artificial Sequence: Synthetic oligonucleotide"
  source: /note="Description of Combined DNA/RNA Molecule: Synthetic oligonucleotide"
uauuauaaaaauaucuugcuuuutt

SEQ ID NO: 2893 - DNA, 25 bp, Artificial Sequence
  source: /note="Description of Artificial Sequence: Synthetic oligonucleotide"
  source: /note="Description of Combined DNA/RNA Molecule: Synthetic oligonucleotide"
uauuauaaaaauaucuugcuuuutt

SEQ ID NO: 2894 - DNA, 25 bp, Artificial Sequence
  source: /note="Description of Artificial Sequence: Synthetic oligonucleotide"
  source: /note="Description of Combined DNA/RNA Molecule: Synthetic oligonucleotide"
uauuauaaaaauaucuugcuuuutt

SEQ ID NO: 2895 - DNA, 25 bp, Artificial Sequence
  source: /note="Description of Artificial Sequence: Synthetic oligonucleotide"
  source: /note="Description of Combined DNA/RNA Molecule: Synthetic oligonucleotide"
uauuauaaaaauaucuugcuuuutt

SEQ ID NO: 2896 - DNA, 25 bp, Artificial Sequence
  source: /note="Description of Artificial Sequence: Synthetic oligonucleotide"
  source: /note="Description of Combined DNA/RNA Molecule: Synthetic oligonucleotide"
uauuauaaaaauaucuugcuuuutt

SEQ ID NO: 2897 - DNA, 25 bp, Artificial Sequence
  source: /note="Description of Artificial Sequence: Synthetic oligonucleotide"
  source: /note="Description of Combined DNA/RNA Molecule: Synthetic oligonucleotide"
uauuauaaaaauaucuugcuuuutt

SEQ ID NO: 2898 - DNA, 25 bp, Artificial Sequence
  source: /note="Description of Artificial Sequence: Synthetic oligonucleotide"
  source: /note="Description of Combined DNA/RNA Molecule: Synthetic oligonucleotide"
uauuauaaaaauaucuugcuuuutt

SEQ ID NO: 2899 - RNA, 21 nt, Artificial Sequence
  source: /note="Description of Artificial Sequence: Synthetic oligonucleotide"
aagcaagauauuuuuauaaua

We claim:

1. A method for treating a subject having paroxysmal nocturnal hemoglobinuria (PNH), comprising
administering to an eculizumab naïve subject a 200-400 mg fixed dose of a double stranded ribonucleic acid (dsRNA) agent for inhibiting expression of complement component C5 once every week; and
administering to the subject a dose of about 300 mg to about 900 mg of eculizumab, or an antigen-binding fragment thereof,
wherein the dsRNA agent comprises a sense strand and an antisense strand, and
wherein the sense strand comprises 5′-asasGfcAfaGfaUfAfUfuUfuuAfuAfaua-3′ (SEQ ID NO:2876) and the antisense strand comprises 5′-usAfsUfuAfuaAfaAfauaUfcUfuGfcuususudTdT-3′ (SEQ ID NO:2889),
wherein a, g, c and u are 2′-O-methyl (2′-OMe) A, G, C, and U, respectively; Af, Gf, Cf and Uf are 2′-fluoro A, G, C and U, respectively; dT is a deoxy-thymine nucleotide; and s is a phosphorothioate linkage, thereby treating the subject.

2. A method for treating a subject having paroxysmal nocturnal hemoglobinuria (PNH), comprising
administering to an eculizumab naïve subject a 200-400 mg fixed dose of a double stranded ribonucleic acid (dsRNA) agent for inhibiting expression of complement component C5 once every month; and
administering to the subject a dose of about 300 mg to about 900 mg of eculizumab, or an antigen-binding fragment thereof,
wherein the dsRNA agent comprises a sense strand and an antisense strand, and
wherein the sense strand comprises 5′-asasGfcAfaGfaUfAfUfuUfuuAfuAfaua-3′ (SEQ ID NO:2876) and the antisense strand comprises 5′-usAfsUfuAfuaAfaAfauaUfcUfuGfcuususudTdT-3′ (SEQ ID NO:2889),
wherein a, g, c and u are 2′-O-methyl (2′-OMe) A, G, C, and U, respectively; Af, Gf, Cf and Uf are 2′-fluoro A, G, C and U, respectively; dT is a deoxy-thymine nucleotide; and s is a phosphorothioate linkage, thereby treating the subject.

3. A method for treating a subject having paroxysmal nocturnal hemoglobinuria (PNH), comprising
administering to an eculizumab naïve subject a 200 mg fixed dose of a double stranded ribonucleic acid (dsRNA) agent for inhibiting expression of complement component C5 once every week for 10-15 weeks, followed by a 400 mg fixed dose of the dsRNA agent once every week; and
administering to the subject, a dose of about 300 mg to about 900 mg of eculizumab, or an antigen-binding fragment thereof,
wherein the dsRNA agent comprises a sense strand and an antisense strand, and
wherein the sense strand comprises 5′-asasGfcAfaGfaUfAfUfuUfuuAfuAfaua-3′ (SEQ ID NO:2876) and the antisense strand comprises 5′-usAfsUfuAfuaAfaAfauaUfcUfuGfcuususudTdT-3′ (SEQ ID NO:2889),
wherein a, g, c and u are 2′-O-methyl (2′-OMe) A, G, C, and U, respectively; Af, Gf, Cf and Uf are 2′-fluoro A, G, C and U, respectively; dT is a deoxy-thymine nucleotide; and s is a phosphorothioate linkage, thereby treating the subject.

4. A method for treating a subject having paroxysmal nocturnal hemoglobinuria (PNH), comprising
administering to an eculizumab naïve subject a 200 mg fixed dose of a double stranded ribonucleic acid (dsRNA) agent for inhibiting expression of complement component C5 once every month for 2 to 4 months; and
administering to the subject, a dose of about 300 mg to about 900 mg of eculizumab, or an antigen-binding fragment thereof,
wherein the dsRNA agent comprises a sense strand and an antisense strand, and
wherein the sense strand comprises 5′-asasGfcAfaGfaUfAfUfuUfuuAfuAfaua-3′ (SEQ ID NO:2876) and the antisense strand comprises 5′-usAfsUfuAfuaAfaAfauaUfcUfuGfcuususudTdT-3′ (SEQ ID NO:2889),
wherein a, g, c and u are 2′-O-methyl (2′-OMe) A, G, C, and U, respectively; Af, Gf, Cf and Uf are 2′-fluoro A, G, C and U, respectively; dT is a deoxy-thymine nucleotide; and s is a phosphorothioate linkage, thereby treating the subject.

5. A method for treating a subject having paroxysmal nocturnal hemoglobinuria (PNH), comprising
administering to an eculizumab naïve subject a 400 mg fixed dose of a double stranded ribonucleic acid (dsRNA) agent for inhibiting expression of complement component C5 once every week; and
administering to the subject, a dose of about 300 mg to about 900 mg of eculizumab, or an antigen-binding fragment thereof,
wherein the dsRNA agent comprises a sense strand and an antisense strand, and
wherein the sense strand comprises 5′-asasGfcAfaGfaUfAfUfuUfuuAfuAfaua-3′ (SEQ ID NO:2876) and the antisense strand comprises 5′-usAfsUfuAfuaAfaAfauaUfcUfuGfcuususudTdT-3′ (SEQ ID NO:2889),
wherein a, g, c and u are 2′-O-methyl (2′-OMe) A, G, C, and U, respectively; Af, Gf, Cf and Uf are 2′-fluoro A, G, C and U, respectively; dT is a deoxy-thymine nucleotide; and s is a phosphorothioate linkage, thereby treating the subject.

6. A method for treating a subject having paroxysmal nocturnal hemoglobinuria (PNH), comprising
administering to an eculizumab naïve subject a 400 mg fixed dose of a double stranded ribonucleic acid (dsRNA) agent for inhibiting expression of complement component C5 once every month; and
administering to the subject, a dose of about 300 mg to about 900 mg of eculizumab, or an antigen-binding fragment thereof,
wherein the dsRNA agent comprises a sense strand and an antisense strand, and
wherein the sense strand comprises 5′-asasGfcAfaGfaUfAfUfuUfuuAfuAfaua-3′ (SEQ ID NO:2876) and the antisense strand comprises 5′-usAfsUfuAfuaAfaAfauaUfcUfuGfcuususudTdT-3′ (SEQ ID NO:2889),
wherein a, g, c and u are 2′-O-methyl (2′-OMe) A, G, C, and U, respectively; Af, Gf, Cf and Uf are 2′-fluoro A, G, C and U, respectively; dT is a deoxy-thymine nucleotide; and s is a phosphorothioate linkage, thereby treating the subject.

7. A method for treating a subject having paroxysmal nocturnal hemoglobinuria (PNH), comprising
administering to a subject previously treated with eculizumab, a 400 mg fixed dose of a double stranded ribonucleic acid (dsRNA) agent for inhibiting expression of complement component C5 once every week; and
administering to the subject, a dose of about 300 mg to about 900 mg of eculizumab, or an antigen-binding fragment thereof,
wherein the dsRNA agent comprises a sense strand and an antisense strand, and
wherein the sense strand comprises 5′-asasGfcAfaGfaUfAfUfuUfuuAfuAfaua-3′ (SEQ ID NO:2876) and the antisense strand comprises 5′-usAfsUfuAfuaAfaAfauaUfcUfuGfcuususudTdT-3′ (SEQ ID NO:2889),
wherein a, g, c and u are 2′-O-methyl (2′-OMe) A, G, C, and U, respectively; Af, Gf, Cf and Uf are 2′-fluoro A, G, C and U, respectively; dT is a deoxy-thymine nucleotide; and s is a phosphorothioate linkage, thereby treating the subject.

8. A method for treating a subject having paroxysmal nocturnal hemoglobinuria (PNH), comprising
administering to a subject previously treated with eculizumab, a 400 mg fixed dose of a double stranded ribonucleic acid (dsRNA) agent for inhibiting expression of complement component C5 once every month; and
administering to the subject, a dose of about 300 mg to about 900 mg of eculizumab, or an antigen-binding fragment thereof,
wherein the dsRNA agent comprises a sense strand and an antisense strand, and
wherein the sense strand comprises 5′-asasGfcAfaGfaUfAfUfuUfuuAfuAfaua-3′ (SEQ ID NO:2876) and the antisense strand comprises 5′-usAfsUfuAfuaAfaAfauaUfcUfuGfcuususudTdT-3′ (SEQ ID NO:2889),
wherein a, g, c and u are 2′-O-methyl (2′-OMe) A, G, C, and U, respectively; Af, Gf, Cf and Uf are 2′-fluoro A, G, C and U, respectively; dT is a deoxy-thymine nucleotide; and s is a phosphorothioate linkage, thereby treating the subject.

9. A method for treating a subject having paroxysmal nocturnal hemoglobinuria (PNH), comprising
administering to a subject previously treated with eculizumab, a 400 mg fixed dose of a double stranded ribonucleic acid (dsRNA) agent for inhibiting expression of complement component C5 once every week for 2-8 weeks; and
administering to the subject, a dose of about 300 mg to about 900 mg of eculizumab, or an antigen-binding fragment thereof,
wherein the dsRNA agent comprises a sense strand and an antisense strand, and
wherein the sense strand comprises 5′-asasGfcAfaGfaUfAfUfuUfuuAfuAfaua-3′ (SEQ ID NO:2876) and the antisense strand comprises 5′-usAfsUfuAfuaAfaAfauaUfcUfuGfcuususudTdT-3′ (SEQ ID NO:2889),
wherein a, g, c and u are 2′-O-methyl (2′-OMe) A, G, C, and U, respectively; Af, Gf, Cf and Uf are 2′-fluoro A, G, C and U, respectively; dT is a deoxy-thymine nucleotide; and s is a phosphorothioate linkage, thereby treating the subject.

10. A method for treating a subject having paroxysmal nocturnal hemoglobinuria (PNH), comprising
administering to a subject previously treated with eculizumab, a 400 mg fixed dose of a double stranded ribonucleic acid (dsRNA) agent for inhibiting expression of complement component C5 once every month for 1-2 months; and
administering to the subject, a dose of about 300 mg to about 900 mg of eculizumab, or an antigen-binding fragment thereof,
wherein the dsRNA agent comprises a sense strand and an antisense strand, and
wherein the sense strand comprises 5′-asasGfcAfaGfaUfAfUfuUfuuAfuAfaua-3′ (SEQ ID NO:2876) and the antisense strand comprises 5′-usAfsUfuAfuaAfaAfauaUfcUfuGfcuususudTdT-3′ (SEQ ID NO:2889),
wherein a, g, c and u are 2′-O-methyl (2′-OMe) A, G, C, and U, respectively; Af, Gf, Cf and Uf are 2′-fluoro A, G, C and U, respectively; dT is a deoxy-thymine nucleotide; and s is a phosphorothioate linkage, thereby treating the subject.

11. A method for treating a subject having paroxysmal nocturnal hemoglobinuria (PNH), comprising
administering to a subject previously treated with eculizumab, a 200 mg fixed dose of a double stranded ribonucleic acid (dsRNA) agent for inhibiting expression of complement component C5 once every week; and
administering to the subject, a dose of about 300 mg to about 900 mg of eculizumab, or an antigen-binding fragment thereof,
wherein the dsRNA agent comprises a sense strand and an antisense strand, and
wherein the sense strand comprises 5′-asasGfcAfaGfaUfAfUfuUfuuAfuAfaua-3′ (SEQ ID NO:2876) and the antisense strand comprises 5′-usAfsUfuAfuaAfaAfauaUfcUfuGfcuususudTdT-3′ (SEQ ID NO:2889),
wherein a, g, c and u are 2′-O-methyl (2′-OMe) A, G, C, and U, respectively; Af, Gf, Cf and Uf are 2′-fluoro A, G, C and U, respectively; dT is a deoxy-thymine nucleotide; and s is a phosphorothioate linkage, thereby treating the subject.

12. A method for treating a subject having paroxysmal nocturnal hemoglobinuria (PNH), comprising
administering to a subject previously treated with eculizumab, a 200 mg fixed dose of a double stranded ribonucleic acid (dsRNA) agent for inhibiting expression of complement component C5 once every month; and
administering to the subject, a dose of about 300 mg to about 900 mg of eculizumab, or an antigen-binding fragment thereof,
wherein the dsRNA agent comprises a sense strand and an antisense strand, and
wherein the sense strand comprises 5′-asasGfcAfaGfaUfAfUfuUfuuAfuAfaua-3′ (SEQ ID NO:2876) and the antisense strand comprises 5′-usAfsUfuAfuaAfaAfauaUfcUfuGfcuususudTdT-3′ (SEQ ID NO:2889),
wherein a, g, c and u are 2′-O-methyl (2′-OMe) A, G, C, and U, respectively; Af, Gf, Cf and Uf are 2′-fluoro A, G, C and U, respectively; dT is a deoxy-thymine nucleotide; and s is a phosphorothioate linkage, thereby treating the subject.

13. A method for treating a subject having paroxysmal nocturnal hemoglobinuria (PNH), comprising
administering to a subject that has not responded to treatment with eculizumab, a 200 mg fixed dose of a double stranded ribonucleic acid (dsRNA) agent for inhibiting expression of complement component C5 once every week; and
administering to the subject, a dose of about 300 mg to about 900 mg of eculizumab, or an antigen-binding fragment thereof,
wherein the dsRNA agent comprises a sense strand and an antisense strand, and
wherein the sense strand comprises 5′-asasGfcAfaGfaUfAfUfuUfuuAfuAfaua-3′ (SEQ ID NO:2876) and the antisense strand comprises 5′-usAfsUfuAfuaAfaAfauaUfcUfuGfcuususudTdT-3′ (SEQ ID NO:2889),
wherein a, g, c and u are 2′-O-methyl (2′-OMe) A, G, C, and U, respectively; Af, Gf, Cf and Uf are 2′-fluoro A, G, C and U, respectively; dT is a deoxy-thymine nucleotide; and s is a phosphorothioate linkage, thereby treating the subject.

14. A method for treating a subject having paroxysmal nocturnal hemoglobinuria (PNH), comprising
administering to a subject that has not responded to treatment with eculizumab, a 200 mg fixed dose of a double stranded ribonucleic acid (dsRNA) agent for inhibiting expression of complement component C5 once every month; and
administering to the subject, a dose of about 300 mg to about 900 mg of eculizumab, or an antigen-binding fragment thereof,
wherein the dsRNA agent comprises a sense strand and an antisense strand, and
wherein the sense strand comprises 5′-asasGfcAfaGfaUfAfUfuUfuuAfuAfaua-3′ (SEQ ID NO:2876) and the antisense strand comprises 5′-usAfsUfuAfuaAfaAfauaUfcUfuGfcuususudTdT-3′ (SEQ ID NO:2889),
wherein a, g, c and u are 2′-O-methyl (2′-OMe) A, G, C, and U, respectively; Af, Gf, Cf and Uf are 2′-fluoro A, G, C and U, respectively; dT is a deoxy-thymine nucleotide; and s is a phosphorothioate linkage, thereby treating the subject.

15. A method for treating a subject having paroxysmal nocturnal hemoglobinuria (PNH), comprising
administering to a subject that has not responded to treatment with eculizumab, a 400 mg fixed dose of a double stranded ribonucleic acid (dsRNA) agent for inhibiting expression of complement component C5 once every week; and
administering to the subject, a dose of about 300 mg to about 900 mg of eculizumab, or an antigen-binding fragment thereof,
wherein the dsRNA agent comprises a sense strand and an antisense strand, and
wherein the sense strand comprises 5′-asasGfcAfaGfaUfAfUfuUfuuAfuAfaua-3′ (SEQ ID NO:2876) and the antisense strand comprises 5′-usAfsUfuAfuaAfaAfauaUfcUfuGfcuususudTdT-3′ (SEQ ID NO:2889),
wherein a, g, c and u are 2′-O-methyl (2′-OMe) A, G, C, and U, respectively; Af, Gf, Cf and Uf are 2′-fluoro A, G, C and U, respectively; dT is a deoxy-thymine nucleotide; and s is a phosphorothioate linkage, thereby treating the subject.

16. A method for treating a subject having paroxysmal nocturnal hemoglobinuria (PNH), comprising
administering to a subject that has not responded to treatment with eculizumab, a 400 mg fixed dose of a double stranded ribonucleic acid (dsRNA) agent for inhibiting expression of complement component C5 once every month; and
administering to the subject, a dose of about 300 mg to about 900 mg of eculizumab, or an antigen-binding fragment thereof,
wherein the dsRNA agent comprises a sense strand and an antisense strand, and
wherein the sense strand comprises 5′-asasGfcAfaGfaUfAfUfuUfuuAfuAfaua-3′ (SEQ ID NO:2876) and the antisense strand comprises 5′-usAfsUfuAfuaAfaAfauaUfcUfuGfcuususudTdT-3′ (SEQ ID NO:2889),
wherein a, g, c and u are 2′-O-methyl (2′-OMe) A, G, C, and U, respectively; Af, Gf, Cf and Uf are 2′-fluoro A, G, C and U, respectively; dT is a deoxy-thymine nucleotide; and s is a phosphorothioate linkage, thereby treating the subject.

17. The method of any one of claims 1-16, wherein the dose of eculizumab, or an antigen-binding fragment thereof, is about 25% to about 75% of the eculizumab maintenance label dose.

18. The method of claim 17, wherein the dose of eculizumab, or an antigen-binding fragment thereof, is 300 mg to 600 mg.

19. The method of claim 17, wherein the dose of eculizumab, or an antigen-binding fragment thereof, is 600 mg to 900 mg.

20. The method of any one of claims 1-16, wherein the frequency of administration of eculizumab is reduced as compared to the frequency of administration required by the label.

21. The method of claim 20, wherein eculizumab is administered to the subject once every four weeks, every 2 months, every 3 months, every 4 months, every 5 months or every 6 months.

22. The method of any one of claims 1-6, wherein the eculizumab, or an antigen-binding fragment thereof, is administered to the subject as a 600 mg fixed dose once every four weeks.

23. The method of any one of claims 1-6, wherein the eculizumab, or an antigen-binding fragment thereof, is administered to the subject as a 300 mg fixed dose once every four weeks.

24. The method of any one of claims 7-16, wherein the eculizumab, or an antigen-binding fragment thereof, is administered to the subject as a 600 mg fixed dose once every four weeks.

25. The method of any one of claims 7-16, wherein the eculizumab, or an antigen-binding fragment thereof, is administered to the subject as a 900 mg fixed dose once every four weeks.

26. The method of any one of claims 7-12, wherein the previous treatment of eculizumab, or an antigen-binding fragment thereof, comprised administration to the subject of a 900 mg fixed dose of eculizumab every other week.

27. The method of any one of claims 13-16, wherein the eculizumab, or an antigen-binding fragment thereof, treatment to which the subject did not respond comprised administration to the subject of a 1200 mg fixed dose every other week.

28. The method of any one of claims 1-27, wherein the dsRNA agent and the eculizumab, or an antigen-binding fragment thereof, are administered to the subject simultaneously.

29. The method of any one of claims 1-27, wherein the dsRNA agent is administered to the subject before the eculizumab, or an antigen-binding fragment thereof.

30. The method of any one of claims 1-27, wherein the eculizumab, or an antigen-binding fragment thereof, is administered to the subject before the dsRNA agent.

31. The method of any one of claims 1-27, wherein the treatment prevents breakthrough hemolysis in the subject.

32. The method of any one of claims 1-27, wherein the treatment reduces the mean maximum C5 mRNA level by at least about 98% relative to baseline.

33. The method of any one of claims 1-27, wherein the treatment lowers the minimum residual C5 level to about 1.0 micrograms/ml or below.

34. The method of any one of claims 1-27, wherein the treatment lowers the classical complement pathway (CCP) activity by at least about 94% relative to baseline.

35. The method of any one of claims 1-27, wherein the treatment lowers the alternative complement pathway (CAP) activity by at least about 94% relative to baseline.

36. The method of any one of claims 1-27, wherein the treatment inhibits the mean maximum hemolysis, as measured by inhibition of sheep red blood cell hemolysis, by at least about 75% relative to baseline.

37. The method of any one of claims 1-27, wherein the treatment lowers the level of lactate dehydrogenase (LDH) in the subject to levels lower than about 1.5 times the upper limit of normal (ULN).

38. The method of any one of claims 7-12, wherein the subject previously treated with eculizumab did not have breakthrough hemolysis.

39. The method of any one of claims 7-12, wherein the subject previously treated with eculizumab had breakthrough hemolysis.

40. The method of any one of claims 1-27, wherein the dsRNA agent is administered to the subject subcutaneously.

41. The method of any one of claims 1-27, wherein the eculizumab is administered to the subject intravenously.

42. The method of any one of claims 1-41, wherein the dsRNA agent further comprises a ligand.

43. The method of claim 42, wherein the ligand is one or more GalNAc derivatives attached through a bivalent or trivalent branched linker.

44. The method of claim 42, wherein the ligand is

[chemical structure]

45. The method of claim 42, wherein the ligand is attached to the 3′ end of the sense strand.

46. The method of claim 45, wherein the RNAi agent is conjugated to the ligand as shown in the following schematic

[chemical structure]

47. A method for treating a subject having paroxysmal nocturnal hemoglobinuria (PNH), comprising
administering to an eculizumab naïve subject a 200 mg fixed dose of a double stranded ribonucleic acid (dsRNA) agent for inhibiting expression of complement component C5 once every week for twelve weeks, followed by a 400 mg fixed dose of the dsRNA agent once every week
wherein the dsRNA agent comprises a sense strand and an antisense strand, and
wherein the sense strand comprises 5′-asasGfcAfaGfaUfAfUfuUfuuAfuAfaua-3′ (SEQ ID NO:2876) and the antisense strand comprises 5′-usAfsUfuAfuaAfaAfauaUfcUfuGfcuususudTdT-3′ (SEQ ID NO:2889),
wherein a, g, c and u are 2′-O-methyl (2′-OMe) A, G, C, and U, respectively; Af, Gf, Cf and Uf are 2′-fluoro A, G, C and U, respectively; dT is a deoxy-thymine nucleotide; and s is a phosphorothioate linkage, thereby treating the subject.

48. The method of any one of claims 1-47, wherein the treatment is chronic.

49. The method of any one of claims 13-16, wherein the dsRNA agent is administered to the subject for 8-15 weeks.
